(19) United States
(12) Patent Application Publication
(10) Pub. No.: US 2025/0312376 A1
(43) Pub. Date: Oct. 9, 2025

(54) COMPOSITIONS AND METHODS FOR MODULATING A GENOME IN T CELLS, INDUCED PLURIPOTENT STEM CELLS, AND RESPIRATORY EPITHELIAL CELLS

(71) Applicant: FLAGSHIP PIONEERING INNOVATIONS VI, LLC, Cambridge, MA (US)

(72) Inventors: Barrett Ethan Steinberg, Somerville, MA (US); Cecilia Giovanna Silvia Cotta-Ramusino, Cambridge, MA (US); Jason John Rodriguez, Watertown, MA (US); Alberto De laco, Cambridge, MA (US); Donghui Li, Somerville, MA (US); Kyusik Kim, Worcester, MA (US); Pin-Fang Chen, Boston, MA (US); Anne Helen Bothmer, Cambridge, MA (US); Aamir Mir, Medford, MA (US); Giulia Schiroli, Boston, MA (US)

(21) Appl. No.: 18/860,423

(22) PCT Filed: Apr. 28, 2023
(86) PCT No.: PCT/US2023/066398

§ 371 Date: Oct. 25, 2024

Related U.S. Application Data
(60) Provisional application No. 63/363,806, filed on Apr. 28, 2022.
(60) Provisional application No. 63/366,173, filed on Jun. 10, 2022.
(60) Provisional application No. 63/378,360, filed on Oct. 4, 2022.
(60) Provisional application No. 63/478,930, filed on Jan. 7, 2023.
(60) Provisional application No. 63/491,439, filed on Mar. 21, 2023.

(51) Int. Cl. A61K 35/17; A61K 40/11; A61K 40/31; A61K 40/42; A61P 35/00; C07K 14/705; C07K 14/725; C12N 5/074; C12N 9/12; C12N 15/11; C12N 15/85; C12N 15/90

(52) U.S. Cl. CPC A61K 35/17; A61K 40/11; A61K 40/31; A61K 40/4215; A61P 35/00; C07K 14/7051; C07K 14/70517; C07K 14/70521; C12N 5/0696; C12N 9/1276; C12N 15/111; C12N 15/85; C12N 15/907; A61K 2239/17; A61K 2239/21; A61K 2239/48; C07K 2317/53; C07K 2319/02; C07K 2319/03; C12N 2310/20; C12N 2510/00

(57) ABSTRACT

Methods and compositions for modulating a target genome are disclosed. For instance, gene modifying systems may be used to insert a heterologous object sequence (e.g., encoding a chimeric antigen receptor) into a target cell. The target cell may be, e.g., a T cell, induced pluripotent stem cell, or respiratory epithelial cell.

### CROSS REFERENCE TO RELATED APPLICATIONS

[0001] This application claims the benefit of U.S. Provisional Application No. 63/363,806, filed Apr. 28, 2022, U.S. Provisional Application No. 63/366,173, filed Jun. 10, 2022, U.S. Provisional Application No. 63/378,360, filed Oct. 4, 2022, U.S. Provisional Application No. 63/478,930, filed Jan. 7, 2023, and U.S. Provisional Application No. 63/491,439, filed Mar. 21, 2023. The contents of the aforementioned applications are hereby incorporated by reference in their entirety.

### SEQUENCE LISTING

[0002] The instant application contains a Sequence Listing which has been submitted electronically in XML format compliant with WIPO Standard ST.26 and is hereby incorporated by reference in its entirety. Said XML copy, created on Apr. 27, 2023, is named V2065-7031WO_SL.xml and is 3,979,000 bytes in size.

### BACKGROUND

[0003] Integration of a nucleic acid of interest into a genome occurs at low frequency and with little site specificity, in the absence of a specialized protein to promote the insertion event. Some existing approaches, like CRISPR/Cas9, are more suited for small edits and are less effective at integrating longer sequences. Other existing approaches, like Cre/loxP, require a first step of inserting a loxP site into the genome and then a second step of inserting a sequence of interest into the loxP site. There is a need in the art for improved proteins for inserting sequences of interest into a genome.

### SUMMARY OF THE INVENTION

[0004] This disclosure relates to novel compositions, systems and methods for altering a genome at one or more locations in a host cell, tissue or subject, in vivo, in vitro, or ex vivo. In particular, the invention features compositions, systems and methods for the introduction of exogenous genetic elements into a host genome. The disclosure also provides systems for altering a genomic DNA sequence of interest, e.g., by inserting, deleting, or substituting one or more nucleotides into/from the sequence of interest.

[0005] Features of the compositions or methods can include one or more of the following enumerated embodiments.
[0006] 1. A system for modifying DNA comprising:
   [0007] (a) a gene modifying polypeptide or a nucleic acid (e.g., DNA or mRNA) encoding the gene modifying polypeptide, and
   [0008] (b) a template RNA (or DNA encoding the template RNA) comprising (i) a sequence that binds the polypeptide and (ii) a heterologous object sequence encoding a chimeric antigen receptor (CAR), wherein the CAR comprises an antigen-binding domain, a transmembrane domain, a first intracellular signaling domain, and a second intracellular signaling domain.
[0009] 2. A system for modifying DNA comprising:
   [0010] (a) a gene modifying polypeptide or a nucleic acid (e.g., DNA or mRNA) encoding the gene modifying polypeptide, and
   [0011] (b) a template RNA (or DNA encoding the template RNA) comprising (i) a sequence that binds the polypeptide and (ii) a heterologous object sequence encoding a chimeric antigen receptor (CAR), wherein one or more of:
   [0012] (i) the CAR comprises an antigen binding domain that binds one or more antigens of a blood cancer (e.g., a leukemia or lymphoma), wherein optionally the antigen is a B cell antigen; (ii) the CAR comprises an antigen binding domain that binds one or more antigens of a solid tumor;
   [0013] (iii) the CAR comprises an antigen binding domain of any one of Tables C1-C5 or C9; (iv) the CAR comprises a linker domain of Table L1 (e.g., a linker of SEQ ID NO 15520);
   [0014] (v) the CAR comprises a transmembrane domain of Table C6 or C6A;
   [0015] (vi) the CAR comprises a hinge domain (e.g., a hinge domain of Table C8);
   [0016] (vii) the CAR comprises an intracellular signaling domain of Table C7 or C7A;
   [0017] (viii) the CAR comprises a costimulatory domain of Table C7 or C7A;
   [0018] (ix) the CAR comprises an antigen binding domain which comprises an scFv, a Fab, a diabody, a D domain binder, a centryin, or one or more single domain antibodies (e.g., VHH domains); or
   [0019] (x) the CAR comprises an amino acid sequence of Table C9 or an amino acid sequence according to any one of SEQ ID NOs: 1100, 15490, 15492, 15498, 15500, 15502, 15503, 15505, 15507, 15509 and 15510, 15555, 15557 and 15558, 15559, 15560, 15561, 15515, 15526, 15531, 15536, 15541, or 15548;
   [0020] (xi) wherein the CAR comprises a first intracellular signaling domain and a second intracellular signaling domain.
[0021] 3. The system of embodiment 1 or 2, wherein the first intracellular signaling domain mediates downstream signaling during T-cell activation.
[0022] 4. The system of any of embodiments 1-3, wherein the second intracellular signaling domain is a costimulatory domain.
[0023] 5. A population of cells comprising immune effector cells and/or regulatory immune cells, the population comprising:
   [0024] a plurality of copies of a gene encoding a CAR (“a CAR gene”), wherein less than or equal to 70%, 65%, 60%, or 55% of copies of the CAR gene in the population are situated within a gene endogenous to a cell of the population.
[0025] 6. A population of cells comprising immune effector cells and/or regulatory immune cells, the population comprising:
   [0026] a plurality of copies of a gene encoding a CAR (“a CAR gene”), wherein less than 10%, 9%, 8%, 7%, 6%, or 5% of copies of the CAR gene in the population are situated within an exon of a gene endogenous to a cell of the population.
[0027] 7. A population of cells comprising immune effector cells and/or regulatory immune cells, the population comprising:
   [0028] a plurality of copies of a gene encoding a CAR (“a CAR gene”), wherein less than 70%, 65%, 60%, 55%, or 50% of copies of the CAR gene in the population are situated within an intron of a gene endogenous to a cell of the population.
[0029] 8. A population of cells comprising immune effector cells and/or regulatory immune cells, the population comprising:
   [0030] a plurality of copies of a gene encoding a CAR (“a CAR gene”), wherein less than 10%, 9%, 8%, or 7% of copies of the CAR gene in the population are situated upstream of a gene (e.g., within 2 kb of a transcriptional start site (TSS)) endogenous to a cell of the population.
[0031] 9. A population of cells comprising immune effector cells and/or regulatory immune cells, the population comprising:
   [0032] a plurality of copies of a gene encoding a CAR (“a CAR gene”), wherein
   [0033] at least 20%, 25%, 30%, 35%, or 40% of copies of the CAR gene in the population are situated within an intergenic region endogenous to a cell of the population.
[0034] 10. The population of cells of any of embodiments 5-9, wherein one or more of:
   [0035] less than or equal to 70%, 65%, 60%, or 55% of copies of the CAR gene in the population are situated within a gene endogenous to a cell of the population;
   [0036] less than 10%, 9%, 8%, 7%, 6%, or 5% of copies of the CAR gene in the population are situated within an exon of a gene endogenous to a cell of the population;
   [0037] less than 70%, 65%, 60%, 55%, or 50% of copies of the CAR gene in the population are situated within an intron of a gene endogenous to a cell of the population;
   [0038] less than 10%, 9%, 8%, or 7% of copies of the CAR gene in the population are situated upstream of a gene (e.g., within 2 kb of a transcriptional start site (TSS)) endogenous to a cell of the population; or
   [0039] at least 20%, 25%, 30%, 35%, or 40% of copies of the CAR gene in the population are situated within an intergenic region endogenous to a cell of the population.
[0040] 11. The population of cells of any of embodiments 5-10, wherein at least 50%, 55%, 60%, 65%, 70%, 75%, 80%, 85%, 90%, 95%, 96%, 97%, 98%, 99%, or 100% of cells in the plurality comprises a single copy of the CAR gene.
[0041] 12. The population of cells of any of embodiments 5-10, wherein each cell in the plurality comprises a single copy of the CAR gene.
[0042] 13. The population of cells of any of embodiments 5-10, wherein at least 0.1%, 1%, 5%, 10%, 15%, 20%, 25%, 30%, or 35%, or 1%-5%, 5%-10%, 10%-15%, 15%-20%, 20%-25%, 25%-30%, or 30%-35% of cells in the population comprise the CAR gene.
[0043] 14. The population of cells of any of embodiments 5-13, which comprises one or more of cancer cells, T effector cells, T helper cells, regulatory T cells, monocytes, and NK cells.
[0044] 15. The population of cells of any of embodiments 5-14, wherein the immune effector cells and/or regulatory immune cells comprise T cells, e.g., primary T cells.
[0045] 16. The population of cells of any of embodiments 5-15, wherein the immune effector cells and/or regulatory immune cells comprise a leukapheresis sample or an apheresis sample.
[0046] 17. The population of cells of any of embodiments 5-16, which is substantially free of lentivirus proteins.
[0047] 18. The population of cells of any of embodiments 5-17, which is substantially free of lentivirus nucleic acids.
[0048] 19. A method of modifying the genome of a mammalian cell, comprising contacting the cell with a system of any of embodiments 1-4, thereby modifying the genome of the mammalian cell.
[0049] 20. The method of embodiment 19, wherein the mammalian cell is a T cell, e.g., a primary T cell.
[0050] 21. A reaction mixture comprising:
   [0051] a system of any of embodiments 1-4, and
   [0052] a mammalian cell.
[0053] 22. A method of modifying the genome of a mammalian T cell (e.g., a primary T cell), the method comprising contacting the cell with:
   [0054] (a) a gene modifying polypeptide comprising an amino acid sequence of Table R1 or E14 or a sequence at least 70%, 75%, 80%, 85%, 90%, 95%, 96%, 97%, 98%, or 99% identical thereto, or a nucleic acid (e.g., DNA or mRNA) encoding the gene modifying polypeptide, and
   [0055] (b) a template RNA (or DNA encoding the template RNA) comprising (i) a sequence that binds the polypeptide and (ii) a heterologous object sequence.
[0056] 23. A method of modifying the genome of a mammalian T cell (e.g., a primary T cell), the method comprising contacting the cell with:
   [0057] (a) a gene modifying polypeptide comprising an amino acid sequence of Table R1 or E14 or a sequence having no more than 10, 20, 30, 40, 50, 60, 70, 80, 90, or 100 amino acid differences thereto, or a nucleic acid (e.g., DNA or mRNA) encoding the gene modifying polypeptide, and
   [0058] (b) a template RNA (or DNA encoding the template RNA) comprising (i) a sequence that binds the polypeptide and (ii) a heterologous object sequence.
[0059] 24. The method of any of embodiments 19, 20, 22, or 23, which is performed ex vivo or in vitro.
[0060] 25. The method of any of embodiments 19, 20, or 22-24, wherein the formulated with an LNP.
[0061] 26. The method of any of embodiments 19, 20, or 22-25, which results in insertion of the heterologous object sequence into at least 1%, 5%, 10%, 15%, 20%, 25%, 30%, or 35% or 1%-5%, 5%-10%, 10%-15%, 15%-20%, 20%-25%, 25%-30%, or 30%-35% of T cells.
[0062] 27. A reaction mixture comprising:
   [0063] a gene modifying polypeptide comprising an amino acid sequence of Table R1 or E14 or a sequence at least 70%, 75%, 80%, 85%, 90%, 95%, 96%, 97%, 98%, or 99% identical thereto, or a nucleic acid (e.g., DNA or mRNA) encoding the gene modifying polypeptide,
   [0064] optionally, a template RNA (or DNA encoding the template RNA) comprising (i) a sequence that binds the polypeptide and (ii) a heterologous object sequence;
   [0065] a mammalian T cell (e.g., a primary T cell).
[0066] 28. A reaction mixture comprising:
   [0067] a gene modifying polypeptide comprising an amino acid sequence of Table R1 or E14 or a sequence no more than 10, 20, 30, 40, 50, 60, 70, 80, 90, or 100 amino acid differences thereto, or a nucleic acid (e.g., DNA or mRNA) encoding the gene modifying polypeptide,
   [0068] optionally, a template RNA (or DNA encoding the template RNA) comprising (i) a sequence that binds the polypeptide and (ii) a heterologous object sequence;
   [0069] a mammalian T cell (e.g., a primary T cell).
[0070] 29. A cell or population of cells produced by the method of any of embodiments 19, 20, 22-26.
[0071] 30. The population of cells of embodiment 29, wherein less than or equal to 70%, 65%, 60%, or 55% of copies of the heterologous object sequence in the population are situated within a gene endogenous to a cell of the population.
[0072] 31. The population of cells of embodiment 29 or 30, wherein less than 10%, 9%, 8%, 7%, 6%, or 5% of copies of the heterologous object sequence in the population are situated within an exon of a gene endogenous to a cell of the population.
[0073] 32. The population of cells of any of embodiments 29-31, wherein less than 70%, 65%, 60%, 55%, or 50% of copies of the heterologous object sequence in the population are situated within an intron of a gene endogenous to a cell of the population.
[0074] 33. The population of cells of any of embodiments 29-32, wherein less than 10%, 9%, 8%, or 7% of copies of the heterologous object sequence in the population are situated upstream of a gene (e.g., within 2 kb of a transcriptional start site (TSS)) endogenous to a cell of the population.
[0075] 34. The population of cells of any of embodiments 29-33, wherein at least 20%, 25%, 30%, 35%, or 40% of copies of the heterologous object sequence in the population are situated within an intergenic region endogenous to a cell of the population.
[0076] 35. A method of treating a cancer in a subject in need thereof, the method comprising administering to the subject a cell or population of cells of any of embodiments 5-18 or 29-34.
[0077] 36. A cell or population of cells of any of embodiments 5-18 or 29-34 or the system of any of embodiments 1-4, for use in treating a cancer.
[0078] 37. Use of a cell or population of cells of any of embodiments 5-18 or 29-34 or the system of any of embodiments 1-4, in the manufacture of a medicament for treating a cancer.
[0079] 38. A method of treating a cancer in a subject in need thereof, the method comprising contacting an immune effector cell and/or regulatory immune cell of the subject with a system of any of embodiments 1-4.
[0080] 39. A gene modifying polypeptide comprising an amino acid sequence of SEQ ID NO: 420, or a sequence having at least 70%, 75%, 80%, 85%, 90%, 95%, 96%, 97%, 98%, or 99% identity thereto, wherein amino acid position 191 is other than D, e.g., is A, or a fragment thereof having reverse transcriptase activity.
[0081] 40. A gene modifying polypeptide comprising an amino acid sequence of SEQ ID NO: 420, or a sequence having no more than 10, 20, 30, 40, 50, 60, 70, 80, 90, or 100 nucleotide differences thereto, wherein amino acid position 191 is other than D, e.g., is A, or a fragment thereof having reverse transcriptase activity.
[0082] 41. The gene modifying polypeptide of embodiment 39 or 40, which has an endonuclease activity of less than 20%, 15%, 10%, or 5% of that of a polypeptide of SEQ ID NO: 405 in an assay according to Example 4.
[0083] 42. A gene modifying polypeptide comprising an amino acid sequence of SEQ ID NO: 421, or a sequence having at least 70%, 75%, 80%, 85%, 90%, 95%, 96%, 97%, 98%, or 99% identity thereto, wherein amino acid position 250 is other than D, e.g., is A, or a fragment thereof having reverse transcriptase activity.
[0084] 43. A gene modifying polypeptide comprising an amino acid sequence of SEQ ID NO: 421, or a sequence having no more than 10, 20, 30, 40, 50, 60, 70, 80, 90, or 100 nucleotide differences thereto, wherein amino acid position 191 is other than D, e.g., is A, or a fragment thereof having reverse transcriptase activity.
[0085] 44. The gene modifying polypeptide of embodiment 42 or 43, which has an endonuclease activity of less than 20%, 15%, 10%, or 5% of that of a polypeptide of SEQ ID NO: 406 in an assay according to Example 4.
[0086] 45. The gene modifying polypeptide of any of embodiments 39-44, which further comprises a heterologous protein domain.
[0087] 46. The gene modifying polypeptide of embodiment 45, wherein a linker is disposed between the heterologous protein domain and the amino acid sequence having at least 70%, 75%, 80%, 85%, 90%, 95%, 96%, 97%, 98%, or 99% identity to a linker in Table L1, or fragment thereof.
[0088] 47. A nucleic acid encoding a gene modifying polypeptide of any of embodiments 39-46.
[0089] 48. A method of modifying the genome of a mammalian induced pluripotent stem cell (iPSC), the method comprising contacting the cell with:
   [0090] (a) a gene modifying polypeptide, or a nucleic acid (e.g., DNA or mRNA) encoding the gene modifying polypeptide, and
   [0091] (b) a template RNA (or DNA encoding the template RNA) comprising (i) a sequence that binds the polypeptide and (ii) a heterologous object sequence.
[0092] 49. The method of embodiment 48, which results in insertion of the heterologous object sequence into at least 5%, 10%, or 15% of iPSCs.
[0093] 50. A reaction mixture comprising:
   [0094] a gene modifying polypeptide, or a nucleic acid (e.g., DNA or mRNA) encoding the gene modifying polypeptide,
   [0095] optionally, a template RNA (or DNA encoding the template RNA) comprising (i) a sequence that binds the polypeptide and (ii) a heterologous object sequence; and
   [0096] an iPSC.
[0097] 51. A method of modifying the genome of a mammalian respiratory epithelial cell (e.g., a bronchial epithelial cell, e.g., a human bronchial epithelial (hBE) cell), the method comprising contacting the cell with:
   [0098] (a) a gene modifying polypeptide, or a nucleic acid (e.g., DNA or mRNA) encoding the gene modifying polypeptide, and
   [0099] (b) a template RNA (or DNA encoding the template RNA) comprising (i) a sequence that binds the polypeptide and (ii) a heterologous object sequence.
[0100] 52. The method of embodiment 51, which results in insertion of the heterologous object sequence into at least 5%, 10%, or 15% of respiratory epithelial cells (e.g., bronchial epithelial cells, e.g., human bronchial epithelial (hBE) cells).
[0101] 53. A reaction mixture comprising:
   [0102] a gene modifying polypeptide, or a nucleic acid (e.g., DNA or mRNA) encoding the gene modifying polypeptide,
   [0103] optionally, a template RNA (or DNA encoding the template RNA) comprising (i) a sequence that binds the polypeptide and (ii) a heterologous object sequence; and
   [0104] a respiratory epithelial cell (e.g., a bronchial epithelial cell, e.g., a human bronchial epithelial (hBE) cell).
[0105] 54. A gene modifying polypeptide comprising an amino acid sequence of SEQ ID NO: 403, or a sequence having at least 70%, 75%, 80%, 85%, 90%, 95%, 96%, 97%, 98%, or 99% identity thereto, wherein one or both of:
   [0106] i) amino acid position 345 is other than D, e.g., is N, and
   [0107] ii) amino acid position 523 is other than T, e.g., is S;
   [0108] or a functional fragment thereof (e.g., having one or both of reverse transcriptase activity and endonuclease activity).
[0109] 55. A gene modifying polypeptide comprising an amino acid sequence of SEQ ID NO: 403, or a sequence having at least 70%, 75%, 80%, 85%, 90%, 95%, 96%, 97%, 98%, or 99% identity thereto, wherein one or both of:
   [0110] i) amino acid position 345 is N, and
   [0111] ii) amino acid position 523 is S;
   [0112] or a functional fragment thereof (e.g., having one or both of reverse transcriptase activity and endonuclease activity).
[0113] 56. A gene modifying polypeptide comprising an amino acid sequence of SEQ ID NO: 405, or a sequence having at least 70%, 75%, 80%, 85%, 90%, 95%, 96%, 97%, 98%, or 99% identity thereto, wherein one, two, or three of:
   [0114] i) amino acid position 444 is other than P, e.g., is A,
   [0115] ii) amino acid position 848 is other than D, e.g., is G; and
   [0116] iii) amino acid position 875 is other than T, e.g., is A
   [0117] or a functional fragment thereof (e.g., having one or both of reverse transcriptase activity and endonuclease activity).
[0118] 57. A gene modifying polypeptide comprising an amino acid sequence of SEQ ID NO: 405, or a sequence having at least 70%, 75%, 80%, 85%, 90%, 95%, 96%, 97%, 98%, or 99% identity thereto, wherein one, two, or three of:
   [0119] i) amino acid position 444 is A,
   [0120] ii) amino acid position 848 is G; and
   [0121] iii) amino acid position 875 is A
   [0122] or a functional fragment thereof (e.g., having one or both of reverse transcriptase activity and endonuclease activity).
[0123] 58. A gene modifying polypeptide comprising an amino acid sequence of SEQ ID NO: 410, or a sequence having at least 70%, 75%, 80%, 85%, 90%, 95%, 96%, 97%, 98%, or 99% identity thereto, wherein one or both of:
   [0124] i) amino acid position 476 is a non-polar residue, e.g., is L, and
   [0125] ii) amino acid position 524 is a non-polar residue, e.g., is L;
   [0126] or a functional fragment thereof (e.g., having one or both of reverse transcriptase activity and endonuclease activity).
[0127] 59. A gene modifying polypeptide comprising an amino acid sequence of SEQ ID NO: 410, or a sequence having at least 70%, 75%, 80%, 85%, 90%, 95%, 96%, 97%, 98%, or 99% identity thereto, wherein one or both of:
   [0128] i) amino acid position 476 is L, and
   [0129] ii) amino acid position 524 is L;
   [0130] or a functional fragment thereof (e.g., having one or both of reverse transcriptase activity and endonuclease activity).
[0131] 60. A gene modifying polypeptide comprising an amino acid sequence of SEQ ID NO: 407, or a sequence having at least 70%, 75%, 80%, 85%, 90%, 95%, 96%, 97%, 98%, or 99% identity thereto, or a functional fragment thereof (e.g., having one or both of reverse transcriptase activity and endonuclease activity).
[0132] 61. A gene modifying polypeptide comprising an amino acid sequence of SEQ ID NO: 408, or a sequence having at least 70%, 75%, 80%, 85%, 90%, 95%, 96%, 97%, 98%, or 99% identity thereto, or a functional fragment thereof (e.g., having one or both of reverse transcriptase activity and endonuclease activity).
[0133] 62. A gene modifying polypeptide comprising an amino acid sequence of SEQ ID NO: 409, or a sequence having at least 70%, 75%, 80%, 85%, 90%, 95%, 96%, 97%, 98%, or 99% identity thereto, or a functional fragment thereof (e.g., having one or both of reverse transcriptase activity and endonuclease activity).
[0134] 63. The method of any of embodiments 19, 20, 22-26, 35, 38, 48 or 49, wherein the DNA damage response (DDR) pathway in the cell (e.g., an iPSC) is not activated, or is activated less than in an otherwise similar cell treated with Cas9, e.g., in an assay according to Example 2.
[0135] 64. The method of any of embodiments 19, 20, 22-26, 35, 38, 48, 49, or 63, wherein the interferon response is not activated, or is activated less than in an otherwise similar cell treated with a gene modifying system comprising elements from a LINE-1 retrotransposase, e.g., in an assay according to Example 3.
[0136] 65. The system, method, cell, population of cells, or reaction mixture of any of the preceding embodiments, wherein the sequence that binds the polypeptide comprises a 5′ UTR, e.g., a 5′ UTR have a sequence listed in Table R1 or E14, or a sequence having at least 80%, 85%, 90%, 95%, 96%, 97%, 98%, or 99% identity thereto.
[0137] 66. The system, method, cell, population of cells, or reaction mixture of any of the preceding embodiments, wherein the sequence that binds the polypeptide comprises a 3′ UTR, e.g., a 3′ UTR have a sequence listed in Table R1 or E14, or a sequence having at least 80%, 85%, 90%, 95%, 96%, 97%, 98%, or 99% identity thereto.
[0138] 67. The system, method, cell, population of cells, or reaction mixture of any of the preceding embodiments, wherein:
   [0139] the sequence that binds the polypeptide comprises a 5′ UTR, e.g., a 5′ UTR have a sequence listed in Table R1 or E14, or a sequence having at least 70%, 75%, 80%, 85%, 90%, 95%, 96%, 97%, 98%, or 99% identity thereto, and
   [0140] the template RNA further comprises a 3′ UTR, e.g., a 3′ UTR have a sequence listed in Table R1 or E14, or a sequence having at least 70%, 75%, 80%, 85%, 90%, 95%, 96%, 97%, 98%, or 99% identity thereto.
[0141] 68. The system, method, cell, population of cells, or reaction mixture of any of the preceding embodiments, wherein the template RNA further comprises one or both of:
   [0142] a 5′ target homology domain and
   [0143] a 3′ target homology domain.
[0144] 69. The system, method, cell, population of cells, or reaction mixture of any of the preceding embodiments, wherein the gene modifying polypeptide comprises an amino acid sequence of Table R1 or E14 or a sequence at least 80%, 85%, 90%, 95%, 96%, 97%, 98%, or 99% identical thereto.
[0145] 70. The system, method, cell, population of cells, or reaction mixture of any of the preceding embodiments, wherein the gene modifying polypeptide comprises an amino acid sequence of SEQ ID NO: 400 or a sequence at least 70%, 75%, 80%, 85%, 90%, 95%, 96%, 97%, 98%, or 99% identical thereto.
[0146] 71. The system, method, cell, population of cells, or reaction mixture of any of the preceding embodiments, wherein the sequence that binds the polypeptide comprises:
   [0147] a 5′ UTR having a sequence of SEQ ID NO: 700 or a sequence at least 80%, 85%, 90%, 95%, 96%, 97%, 98%, or 99% identical thereto; and
   [0148] a 3′ UTR having a sequence of SEQ ID NO: 800 or a sequence at least 80%, 85%, 90%, 95%, 96%, 97%, 98%, or 99% identical thereto.
[0149] 72. The system, method, cell, population of cells, or reaction mixture of any of the preceding embodiments, wherein the gene modifying polypeptide comprises an amino acid sequence of SEQ ID NO: 401 or a sequence at least 70%, 75%, 80%, 85%, 90%, 95%, 96%, 97%, 98%, or 99% identical thereto.
[0150] 73. The system, method, cell, population of cells, or reaction mixture of embodiment 69, wherein the sequence that binds the polypeptide comprises:
   [0151] a 5′ UTR having a sequence of SEQ ID NO: 701 or a sequence at least 80%, 85%, 90%, 95%, 96%, 97%, 98%, or 99% identical thereto; and
   [0152] a 3′ UTR having a sequence of SEQ ID NO: 801 or a sequence at least 80%, 85%, 90%, 95%, 96%, 97%, 98%, or 99% identical thereto.
[0153] 74. The system, method, cell, population of cells, or reaction mixture of any of the preceding embodiments, wherein the gene modifying polypeptide comprises an amino acid sequence of SEQ ID NO: 402 or a sequence at least 70%, 75%, 80%, 85%, 90%, 95%, 96%, 97%, 98%, or 99% identical thereto.
[0154] 75. The system, method, cell, population of cells, or reaction mixture of embodiment 74, wherein the sequence that binds the polypeptide comprises:
   [0155] a 5′ UTR having a sequence of SEQ ID NO: 702 or a sequence at least 80%, 85%, 90%, 95%, 96%, 97%, 98%, or 99% identical thereto; and
   [0156] a 3′ UTR having a sequence of SEQ ID NO: 802 or a sequence at least 80%, 85%, 90%, 95%, 96%, 97%, 98%, or 99% identical thereto.
[0157] 76. The system, method, cell, population of cells, or reaction mixture of any of the preceding embodiments, wherein the gene modifying polypeptide comprises an amino acid sequence of SEQ ID NO: 403 or a sequence at least 70%, 75%, 80%, 85%, 90%, 95%, 96%, 97%, 98%, or 99% identical thereto.
[0158] 77. The system, method, cell, population of cells, or reaction mixture of embodiment 76, wherein the sequence that binds the polypeptide comprises:
   [0159] a 5′ UTR having a sequence of SEQ ID NO: 703 or a sequence at least 80%, 85%, 90%, 95%, 96%, 97%, 98%, or 99% identical thereto; and
   [0160] a 3′ UTR having a sequence of SEQ ID NO: 803 or a sequence at least 80%, 85%, 90%, 95%, 96%, 97%, 98%, or 99% identical thereto.
[0161] 78. The system, method, cell, population of cells, or reaction mixture of any of the preceding embodiments, wherein the gene modifying polypeptide comprises an amino acid sequence of SEQ ID NO:404 or a sequence at least 70%, 75%, 80%, 85%, 90%, 95%, 96%, 97%, 98%, or 99% identical thereto.
[0162] 79. The system, method, cell, population of cells, or reaction mixture of embodiment 78, wherein the sequence that binds the polypeptide comprises:
   [0163] a 5′ UTR having a sequence of SEQ ID NO: 704 or a sequence at least 80%, 85%, 90%, 95%, 96%, 97%, 98%, or 99% identical thereto; and
   [0164] a 3′ UTR having a sequence of SEQ ID NO: 804 or a sequence at least 80%, 85%, 90%, 95%, 96%, 97%, 98%, or 99% identical thereto.
[0165] 80. The system, method, cell, population of cells, or reaction mixture of any of the preceding embodiments, wherein the gene modifying polypeptide comprises an amino acid sequence of SEQ ID NO: 405 or a sequence at least 70%, 75%, 80%, 85%, 90%, 95%, 96%, 97%, 98%, or 99% identical thereto.
[0166] 81. The system, method, cell, population of cells, or reaction mixture of embodiment 80, wherein the sequence that binds the polypeptide comprises:
   [0167] a 5′ UTR having a sequence of SEQ ID NO: 705 or a sequence at least 80%, 85%, 90%, 95%, 96%, 97%, 98%, or 99% identical thereto; and
   [0168] a 3′ UTR having a sequence of SEQ ID NO: 805 or a sequence at least 80%, 85%, 90%, 95%, 96%, 97%, 98%, or 99% identical thereto.
[0169] 82. The system, method, cell, population of cells, or reaction mixture of any of the preceding embodiments, wherein the gene modifying polypeptide comprises an amino acid sequence of SEQ ID NO: 406 or a sequence at least 70%, 75%, 80%, 85%, 90%, 95%, 96%, 97%, 98%, or 99% identical thereto.
[0170] 83. The system, method, cell, population of cells, or reaction mixture of embodiment 82, wherein the sequence that binds the polypeptide comprises:
   [0171] a 5′ UTR having a sequence of SEQ ID NO: 706 or a sequence at least 80%, 85%, 90%, 95%, 96%, 97%, 98%, or 99% identical thereto; and
   [0172] a 3′ UTR having a sequence of SEQ ID NO: 806 or a sequence at least 80%, 85%, 90%, 95%, 96%, 97%, 98%, or 99% identical thereto.
[0173] 84. The system, method, cell, population of cells, or reaction mixture of any of the preceding embodiments, wherein the gene modifying polypeptide comprises an amino acid sequence of SEQ ID NO: 407 or a sequence at least 70%, 75%, 80%, 85%, 90%, 95%, 96%, 97%, 98%, or 99% identical thereto.
[0174] 85. The system, method, cell, population of cells, or reaction mixture of embodiment 84, wherein the sequence that binds the polypeptide comprises:
   [0175] a 5′ UTR having a sequence of SEQ ID NO: 707 or a sequence at least 80%, 85%, 90%, 95%, 96%, 97%, 98%, or 99% identical thereto; and
   [0176] a 3′ UTR having a sequence of SEQ ID NO: 807 or a sequence at least 80%, 85%, 90%, 95%, 96%, 97%, 98%, or 99% identical thereto.
[0177] 86. The system, method, cell, population of cells, or reaction mixture of any of the preceding embodiments, wherein the gene modifying polypeptide comprises an amino acid sequence of SEQ ID NO: 408 or a sequence at least 70%, 75%, 80%, 85%, 90%, 95%, 96%, 97%, 98%, or 99% identical thereto.
[0178] 87. The system, method, cell, population of cells, or reaction mixture of embodiment 86, wherein the sequence that binds the polypeptide comprises:
   [0179] a 5′ UTR having a sequence of SEQ ID NO: 708 or a sequence at least 80%, 85%, 90%, 95%, 96%, 97%, 98%, or 99% identical thereto; and
   [0180] a 3′ UTR having a sequence of SEQ ID NO: 808 or a sequence at least 80%, 85%, 90%, 95%, 96%, 97%, 98%, or 99% identical thereto.
[0181] 88. The system, method, cell, population of cells, or reaction mixture of any of the preceding embodiments, wherein the gene modifying polypeptide comprises an amino acid sequence of SEQ ID NO: 409 or a sequence at least 70%, 75%, 80%, 85%, 90%, 95%, 96%, 97%, 98%, or 99% identical thereto.
[0182] 89. The system, method, cell, population of cells, or reaction mixture of embodiment 88, wherein the sequence that binds the polypeptide comprises:
   [0183] a 5′ UTR having a sequence of SEQ ID NO: 709 or a sequence at least 80%, 85%, 90%, 95%, 96%, 97%, 98%, or 99% identical thereto; and
   [0184] a 3′ UTR having a sequence of SEQ ID NO: 809 or a sequence at least 80%, 85%, 90%, 95%, 96%, 97%, 98%, or 99% identical thereto.
[0185] 90. The system, method, cell, population of cells, or reaction mixture of any of the preceding embodiments, wherein the gene modifying polypeptide comprises an amino acid sequence of SEQ ID NO: 410 or a sequence at least 70%, 75%, 80%, 85%, 90%, 95%, 96%, 97%, 98%, or 99% identical thereto.
[0186] 91. The system, method, cell, population of cells, or reaction mixture of embodiment 90, wherein the sequence that binds the polypeptide comprises:
   [0187] a 5′ UTR having a sequence of SEQ ID NO: 710 or a sequence at least 80%, 85%, 90%, 95%, 96%, 97%, 98%, or 99% identical thereto; and
   [0188] a 3′ UTR having a sequence of SEQ ID NO: 810 or a sequence at least 80%, 85%, 90%, 95%, 96%, 97%, 98%, or 99% identical thereto.
[0189] 92. A pharmaceutical composition comprising the system of any of embodiments 1-4 or 65-91.
[0190] 93. A lipid nanoparticle (LNP) composition comprising the system of any of embodiments 1-4 or 65-91.
[0191] 94. The LNP composition of embodiment 93, wherein (a) and (b) are encapsulated in the same LNP.
[0192] 95. The LNP composition of embodiment 93, wherein (a) and (b) are encapsulated in different LNPs.
[0193] 96. A method for modifying the genome of a mammalian cell, the method comprising contacting a population of cells with:
   [0194] (a) a heterologous gene modifying system comprising:
      [0195] (i) a heterologous gene modifying polypeptide or a nucleic acid (e.g., DNA or mRNA) encoding the heterologous gene modifying polypeptide,
      [0196] (ii) a first template RNA (or DNA encoding the template RNA) comprising (1) a gRNA spacer, (2) a gRNA scaffold, (3) a heterologous object sequence, and (4) a primer binding site (PBS) sequence, wherein the first template RNA is configured to produce a first mutation; and
      [0197] (iii) a second template RNA (or DNA encoding the template RNA) comprising (1) a gRNA spacer, (2) a gRNA scaffold, (3) a heterologous object sequence, and (4) a primer binding site (PBS) sequence, wherein the second template RNA is configured to produce a second mutation; and
   [0198] (b) a retrotransposon gene modifying system comprising:
      [0199] (i) a retrotransposon gene modifying polypeptide or a nucleic acid (e.g., DNA or mRNA) encoding the retrotransposon gene modifying polypeptide, and
      [0200] (ii) a template RNA (or DNA encoding the template RNA) comprising (1) a sequence that binds the polypeptide and (2) a heterologous object sequence encoding a transgene.
[0201] 97. The method of embodiment 96, which results in installation of the first and second mutations (e.g., insertions) in at least 40%, 50%, 60%, 70%, 75% of said cells.
[0202] 98. The method of embodiment 96 or 97, which results in installation of the transgene in at least 5%, 10%, 15% of said cells.
[0203] 99. The method of any of embodiments 96-98, which results in installation of the first mutation, the second mutation, and the transgene in at least 5%, 10%, 15% of said cells.

### Definitions

[0204] Antigen binding domain: The term “antigen binding domain” as used herein refers to that portion of antibody or a chimeric antigen receptor which binds an antigen. In some embodiments, an antigen binding domain binds to a cell surface antigen of a cell. In some embodiments an antigen binding domain binds an antigen characteristic of a cancer, e.g., a tumor associated antigen in a neoplastic cell. In some embodiments, an antigen binding domain binds an antigen characteristic of an infectious disease, e.g. a virus associated antigen in a virus infected cell. In some embodiments, an antigen binding domain binds an antigen characteristic of a cell targeted by a subject's immune system in an autoimmune disease, e.g., a self-antigen. In some embodiments, an antigen binding domain is or comprises an antibody or antigen-binding portion thereof. In some embodiments, an antigen binding domain is or comprises an scFv, Fab, diabody, D domain binder, centryin, or one or more single domain antibodies (e.g., VHH domains)

[0205] Domain: The term “domain” as used herein refers to a structure of a biomolecule that contributes to a specified function of the biomolecule. A domain may comprise a contiguous region (e.g., a contiguous sequence) or distinct, non-contiguous regions (e.g., non-contiguous sequences) of a biomolecule. Examples of protein domains include, but are not limited to, an endonuclease domain, a DNA binding domain, a reverse transcriptase domain; an example of a domain of a nucleic acid is a regulatory domain, such as a transcription factor binding domain.

[0206] Exogenous: As used herein, the term “exogenous,” when used with reference to a biomolecule (such as a nucleic acid sequence or polypeptide) means that the biomolecule was introduced into a host genome, cell, or organism by the hand of man. For example, a nucleic acid that is as added into an existing genome, cell, tissue, or subject using recombinant DNA techniques or other methods is exogenous to the existing nucleic acid sequence, cell, tissue or subject.

[0207] Genomic safe harbor site (GSH site): A “genomic safe harbor site” is a site in a host genome that is able to accommodate the integration of new genetic material, e.g., such that the inserted genetic element does not cause significant alterations of the host genome posing a risk to the host cell or organism. A GSH site generally meets 1, 2, 3, 4, 5, 6, 7, 8 or 9 of the following criteria: (i) is located >300 kb from a cancer-related gene; (ii) is >300 kb from a miRNA/other functional small RNA; (iii) is >50 kb from a 5′ gene end; (iv) is >50 kb from a replication origin; (v) is >50 kb away from any ultraconservered element; (vi) has low transcriptional activity (i.e. no mRNA+/−25 kb); (vii) is not in copy number variable region; (viii) is in open chromatin; and/or (ix) is unique, with 1 copy in the human genome. Examples of GSH sites in the human genome that meet some or all of these criteria include (i) the adeno-associated virus site 1 (AAVS1), a naturally occurring site of integration of AAV virus on chromosome 19; (ii) the chemokine (C-C motif) receptor 5 (CCR5) gene, a chemokine receptor gene known as an HIV-1 coreceptor; (iii) the human ortholog of the mouse Rosa26 locus; (iv) the rDNA locus. Additional GSH sites are known and described, e.g., in Pellenz et al. epub Aug. 20, 2018 (doi.org/10.1101/396390).

[0208] Heterologous: The term “heterologous”, when used to describe a first element in reference to a second element means that the first element and second element do not exist in nature disposed as described. For example, a heterologous polypeptide, nucleic acid molecule, construct or sequence refers to (a) a polypeptide, nucleic acid molecule or portion of a polypeptide or nucleic acid molecule sequence that is not native to a cell in which it is expressed, (b) a polypeptide or nucleic acid molecule or portion of a polypeptide or nucleic acid molecule that has been altered or mutated relative to its native state, or (c) a polypeptide or nucleic acid molecule with an altered expression as compared to the native expression levels under similar conditions. For example, a heterologous regulatory sequence (e.g., promoter, enhancer) may be used to regulate expression of a gene or a nucleic acid molecule in a way that is different than the gene or a nucleic acid molecule is normally expressed in nature. In another example, a heterologous domain of a polypeptide or nucleic acid sequence (e.g., a DNA binding domain of a polypeptide or nucleic acid encoding a DNA binding domain of a polypeptide) may be disposed relative to other domains or may be a different sequence or from a different source, relative to other domains or portions of a polypeptide or its encoding nucleic acid. In certain embodiments, a heterologous nucleic acid molecule may exist in a native host cell genome, but may have an altered expression level or have a different sequence or both. In other embodiments, heterologous nucleic acid molecules may not be endogenous to a host cell or host genome but instead may have been introduced into a host cell by transformation (e.g., transfection, electroporation), wherein the added molecule may integrate into the host genome or can exist as extra-chromosomal genetic material either transiently (e.g., mRNA) or semi-stably for more than one generation (e.g., episomal viral vector, plasmid or other self-replicating vector). In some embodiments, a domain is heterologous relative to another domain, if the first domain is not naturally comprised in the same polypeptide as the other domain (e.g., a fusion between two domains of different proteins from the same organism).

[0209] Mutation or Mutated: The term “mutated” when applied to nucleic acid sequences means that nucleotides in a nucleic acid sequence may be inserted, deleted or changed compared to a reference (e.g., native) nucleic acid sequence. A single alteration may be made at a locus (a point mutation) or multiple nucleotides may be inserted, deleted, or changed at a single locus. In addition, one or more alterations may be made at any number of loci within a nucleic acid sequence. A nucleic acid sequence may be mutated by any method known in the art. In some embodiments a mutation occurs naturally. In some embodiments a desired mutation can be produced by a system described herein.

[0210] Nucleic acid molecule: “Nucleic acid molecule” refers to both RNA and DNA molecules including, without limitation, cDNA, genomic DNA and mRNA, and also includes synthetic nucleic acid molecules, such as those that are chemically synthesized or recombinantly produced, such as RNA templates, as described herein. The nucleic acid molecule can be double-stranded or single-stranded, circular or linear. If single-stranded, the nucleic acid molecule can be the sense strand or the antisense strand. Unless otherwise indicated, and as an example for all sequences described herein under the general format “SEQ ID NO:,” “nucleic acid comprising SEQ ID NO:1” refers to a nucleic acid, at least a portion which has either (i) the sequence of SEQ ID NO:1, or (ii) a sequence complimentary to SEQ ID NO:1. The choice between the two is dictated by the context in which SEQ ID NO:1 is used. For instance, if the nucleic acid is used as a probe, the choice between the two is dictated by the requirement that the probe be complimentary to the desired target. Nucleic acid sequences of the present disclosure may be modified chemically or biochemically or may contain non-natural or derivatized nucleotide bases, as will be readily appreciated by those of skill in the art. Such modifications include, for example, labels, methylation, substitution of one or more naturally occurring nucleotides with an analog, inter-nucleotide modifications such as uncharged linkages (for example, methyl phosphonates, phosphotriesters, phosphoramidates, carbamates, etc.), charged linkages (for example, phosphorothioates, phosphorodithioates, etc.), pendant moieties, (for example, polypeptides), intercalators (for example, acridine, psoralen, etc.), chelators, alkylators, and modified linkages (for example, alpha anomeric nucleic acids, etc.). Also included are synthetic molecules that mimic polynucleotides in their ability to bind to a designated sequence via hydrogen bonding and other chemical interactions. Such molecules are known in the art and include, for example, those in which peptide linkages substitute for phosphate linkages in the backbone of a molecule. Other modifications can include, for example, analogs in which the ribose ring contains a bridging moiety or other structure such as modifications found in “locked” nucleic acids.

[0211] Gene expression unit: a “gene expression unit” is a nucleic acid sequence comprising at least one regulatory nucleic acid sequence operably linked to at least one effector sequence. A first nucleic acid sequence is operably linked with a second nucleic acid sequence when the first nucleic acid sequence is placed in a functional relationship with the second nucleic acid sequence. For instance, a promoter or enhancer is operably linked to a coding sequence if the promoter or enhancer affects the transcription or expression of the coding sequence. Operably linked DNA sequences may be contiguous or non-contiguous. Where necessary to join two protein-coding regions, operably linked sequences may be in the same reading frame.

[0212] Gene modifying polypeptide: A “gene modifying polypeptide,” and “retrotransposon gene modifying polypeptide” as used herein interchangeably to refer to a polypeptide comprising a retrotransposase reverse transcriptase domain and a retrotransposase endonuclease domain, or a polypeptide comprising an amino acid sequence having at least 75%, 80%, 85%, 90%, 95%, 96%, 97%, 98%, or 99% amino acid sequence identity to said domains, which is capable of integrating a nucleic acid sequence (e.g., a sequence provided on a template nucleic acid) into a target DNA molecule (e.g., in a mammalian host cell, such as a genomic DNA molecule in the host cell). In some embodiments, the endonuclease domain is a catalytically inactive endonuclease domain. In some embodiments, the retrotransposase reverse transcriptase domain and a retrotransposase endonuclease domain are derived from the same retrotransposase. In some embodiments, the gene modifying polypeptide is capable of integrating the sequence substantially without relying on host machinery. In some embodiments, the gene modifying polypeptide integrates a sequence into a random position in a genome, and in some embodiments, the gene modifying polypeptide integrates a sequence into a specific target site. In some embodiments, a gene modifying polypeptide includes one or more domains that, collectively, facilitate 1) binding the template nucleic acid, 2) binding the target DNA molecule, and 3) facilitate integration of the at least a portion of the template nucleic acid into the target DNA. Gene modifying polypeptides include both naturally occurring polypeptides as well as engineered variants of the foregoing, e.g., having one or more amino acid substitutions to the naturally occurring sequence. Gene modifying polypeptides also include heterologous constructs, e.g., where one or more of the domains recited above are heterologous to each other, whether through a heterologous fusion (or other conjugate) of otherwise wild-type domains, as well as fusions of modified domains, e.g., by way of replacement or fusion of a heterologous sub-domain or other substituted domain. Exemplary gene modifying polypeptides, and systems comprising them and methods of using them, that can be used in the methods provided herein are described, e.g., in WO/2021/178717, which is incorporated herein by reference, including Tables 10, 11, X, 3A, 3B, and Z1 therein. In some embodiments, a gene modifying polypeptide integrates a sequence into a gene. In some embodiments, a gene modifying polypeptide integrates a sequence into a sequence outside of a gene. A “gene modifying system,” as used herein, refers to a system comprising a gene modifying polypeptide and a template nucleic acid.

[0213] Heterologous gene modifying polypeptide: As used herein, the term “heterologous gene modifying polypeptide” refers to a polypeptide comprising a retroviral reverse transcriptase, or a polypeptide comprising an amino acid sequence having at least 75%, 80%, 85%, 90%, 95%, 96%, 97%, 98%, or 99% amino acid sequence identity to a retroviral reverse transcriptase, which is capable of integrating a nucleic acid sequence (e.g., a sequence provided on a template nucleic acid) into a target DNA molecule (e.g., in a mammalian host cell, such as a genomic DNA molecule in the host cell). In some embodiments, the heterologous gene modifying polypeptide is capable of integrating the sequence substantially without relying on host machinery. In some embodiments, the heterologous gene modifying polypeptide integrates a sequence into a random position in a genome, and in some embodiments, the heterologous gene modifying polypeptide integrates a sequence into a specific target site. In some embodiments, the sequence that is integrated comprises a deletion, substitution, or insertion relative to the target DNA molecule. In some embodiments, a heterologous gene modifying polypeptide includes one or more domains that, collectively, facilitate 1) binding the template nucleic acid, 2) binding the target DNA molecule, and 3) facilitate integration of the at least a portion of the template nucleic acid into the target DNA. Heterologous gene modifying polypeptides include both naturally occurring polypeptides as well as engineered variants of the foregoing, e.g., having one or more amino acid substitutions to the naturally occurring sequence. Heterologous gene modifying polypeptides also include heterologous constructs, e.g., where one or more of the domains recited above are heterologous to each other, whether through a heterologous fusion (or other conjugate) of otherwise wild-type domains, as well as fusions of modified domains, e.g., by way of replacement or fusion of a heterologous sub-domain or other substituted domain. Exemplary heterologous gene modifying polypeptides, and systems comprising them and methods of using them, that can be used in the methods provided herein are described, e.g., in PCT/US2021/020948, which is incorporated herein by reference with respect to heterologous gene modifying polypeptides that comprise a retroviral reverse transcriptase domain. In some embodiments, a heterologous gene modifying polypeptide integrates a sequence into a gene. In some embodiments, a heterologous gene modifying polypeptide integrates a sequence into a sequence outside of a gene.

[0214] Host: The terms “host genome” or “host cell,” as used herein, refer to a cell and/or its genome into which protein and/or genetic material has been introduced. It should be understood that such terms are intended to refer not only to the particular subject cell and/or genome, but to the progeny of such a cell and/or the genome of the progeny of such a cell. Because certain modifications may occur in succeeding generations due to either mutation or environmental influences, such progeny may not, in fact, be identical to the parent cell, but are still included within the scope of the term “host cell” as used herein. A host genome or host cell may be an isolated cell or cell line grown in culture, or genomic material isolated from such a cell or cell line, or may be a host cell or host genome which composing living tissue or an organism. In some instances, a host cell may be an animal cell or a plant cell, e.g., as described herein. In certain instances, a host cell may be a bovine cell, horse cell, pig cell, goat cell, sheep cell, chicken cell, or turkey cell. In certain instances, a host cell may be a corn cell, soy cell, wheat cell, or rice cell.

[0215] Pseudoknot: A “pseudoknot sequence” sequence, as used herein, refers to a nucleic acid (e.g., RNA) having a sequence with suitable self-complementarity to form a pseudoknot structure, e.g., having: a first segment, a second segment between the first segment and a third segment, wherein the third segment is complementary to the first segment, and a fourth segment, wherein the fourth segment is complementary to the second segment. The pseudoknot may optionally have additional secondary structure, e.g., a stem loop disposed in the second segment, a stem-loop disposed between the second segment and third segment, sequence before the first segment, or sequence after the fourth segment. The pseudoknot may have additional sequence between the first and second segments, between the second and third segments, or between the third and fourth segments. In some embodiments, the segments are arranged, from 5′ to 3′: first, second, third, and fourth. In some embodiments, the first and third segments comprise five base pairs of perfect complementarity. In some embodiments, the second and fourth segments comprise 10 base pairs, optionally with one or more (e.g., two) bulges. In some embodiments, the second segment comprises one or more unpaired nucleotides, e.g., forming a loop. In some embodiments, the third segment comprises one or more unpaired nucleotides, e.g., forming a loop.

[0216] Stem-loop sequence: As used herein, a “stem-loop sequence” refers to a nucleic acid sequence (e.g., RNA sequence) with sufficient self-complementarity to form a stem-loop, e.g., having a stem comprising at least two (e.g., 3, 4, 5, 6, 7, 8, 9, or 10) base pairs, and a loop with at least three (e.g., four) base pairs. The stem may comprise mismatches or bulges.

### BRIEF DESCRIPTION OF THE DRAWINGS

[0217] The patent or application file contains at least one drawing executed in color. Copies of this patent or patent application publication with color drawing(s) will be provided by the Office upon request and payment of the necessary fee.

[0218] FIG. 1 is a schematic of a gene modifying system.

[0219] FIGS. 2A-2B are a series of charts demonstrating that a gene modifying systems described herein yield a different integration profile than a lentiviral system.

[0220] FIGS. 3A-3B are a series of graphs showing integration and expression of a template in primary cells by gene modifying systems delivered as all RNA (FIG. 3A) and a pair of blots demonstrating that a gene modifying system described herein does not activate DNA damage response pathways in primary cells (FIG. 3B).

[0221] FIG. 4 is a pair of graphs demonstrating that a gene modifying system described herein do not activate interferon response in primary cells.

[0222] FIG. 5 is a pair of graphs demonstrating the effects of a point mutation at the endonuclease active site on retrotransposition activity in human cells. (A) Retrotransposition as measured by a GFPai reporter. (B) Retrotransposition as measured by ddPCR assay.

[0223] FIGS. 6A-6C demonstrates that gene editing of a primary human T cells to install a BCMA CAR by a gene modifying system results in CART cells that can kill target tumor cells. FIG. 6A is a diagram showing the elements of the CAR molecule. FIG. 6B is a series of flow cytometry plots showing the percentage of CAR+ T cells. FIG. 6C is a graph showing the % killing of tumor cells when contacted with CART cells produced with retrotransposon-based gene modifying systems and lentiviral systems.

[0224] FIG. 7 is a graph showing expression of BCMA-CAR from primary human T cells electroporated with RTE1_MD gene modifying polypeptide encoding nucleic acid and BCMA CAR template. As controls, T cells were electroporated with only RTE1_MD gene modifying polypeptide encoding nucleic acid and only with BCMA-CAR template. Each data point represents one donor.

[0225] FIGS. 8A and 8B are graphs showing cytotoxic killing of RTE1_MD gene modifying system-derived BCMA CART cells from two different donors (FIG. 8A) and IFNgamma production and Granzyme B release from supernatants (FIG. 8A) as measured by ELISA (FIG. 8B).

[0226] FIG. 9A is a process flow for introducing Vingi-1_Acar gene modifying system to activated human primary T cells.

[0227] FIG. 9B is a schematic of BCMA-CAR-T2A-RQR8 template used (top panel) and a graph showing percentage of primary human T cells expressing BCMA-CAR before and after CD34 bead-based enrichment (bottom panel).

[0228] FIGS. 10A and 10B are graphs showing percent killing (FIG. 10A) and IFNγ levels (FIG. 10B) following co-culture of BCMA-CAR T cells with BCMA-positive tumor cell lines.

[0229] FIGS. 11A-11C are graphs showing individual tumor volume following treatment with vehicle (FIG. 11A), untransduced T cells (FIG. 11B), or BCMA CART (FIG. 11C).

[0230] FIG. 12 is a graph showing levels of editing by the second gene modifying system in the bulk T cell population when the cells were transfected with the second gene modifying system, either alone or in combination with the first gene modifying system.

[0231] FIG. 13 is a graph showing the levels of editing by the first gene modifying system in the bulk T cell population when the cells were transfected with the first gene modifying system, either alone or in combination with the second gene modifying system.

[0232] FIG. 14 is a graph showing shows the levels of editing by the first gene modifying system (measured here as loss of expression of CD3) when the cells were co-transfected with the first gene modifying system specifically breaking out TRAC editing levels in sub-populations of cells that were edited or not edited by the second gene modifying system (that were GFP+ or BCMA CAR+ T cells, or GFP− or BCMA CAR−).

[0233] FIG. 15 is a graph showing a phenotypic characterization by flow cytometry of T cells treated with the first gene modifying system, both the first and second gene modifying systems, or a mock treatment lacking both gene modifying systems.

[0234] FIG. 16 is a graph showing expression of BCMA-CAR from primary human T cells electroporated with Vingi1-Acar gene modifying polypeptide and a BCMA CAR template or RTE1_MD gene modifying polypeptide and BCMA CAR template.

[0235] FIG. 17 is a graph showing the levels of editing by the retrotransposon gene modifying system in the bulk T cell population when the cells were transfected with the retrotransposon gene modifying system, either alone or in combination with the heterologous gene modifying system.

[0236] FIG. 18 is a graph showing the levels of editing by the heterologous gene modifying system (containing a template RNA designed to produce an insertion in TRAC and a template RNA designed to produce an insertion in B2M) in the bulk T cell population when the cells were transfected with the heterologous gene modifying system either alone or in combination with the retrotransposon gene modifying system.

[0237] FIG. 19 is a graph showing the levels of cells edited by the heterologous gene modifying system (measured here as combined loss of expression of CD3 and B2M by flow cytometry) and also edited by the retrotransposon gene editing system (that were GFP+ or BCMA CAR+ T cells).

[0238] FIG. 20 is a graph showing a phenotypic characterization by flow cytometry of T cells treated with the heterologous gene modifying system (containing a template RNA designed to produce an insertion in TRAC and a template RNA designed to produce an insertion in B2M), both the heterologous and retrotransposon gene modifying systems, or a mock treatment lacking both gene modifying systems.

[0239] FIG. 21 is a graph showing percent cytokine expressing cells as assessed by flow cytometry of T cells edited with the heterologous gene modifying system (containing a template RNA designed to produce an insertion in TRAC and a template RNA designed to produce an insertion in B2M), edited with both the heterologous and retrotransposon gene modifying systems, or a mock treated cells edited by neither gene modifying systems.

[0240] FIG. 22 is a graph showing the percentage of edited activated T cells at the TRAC and B2M loci by a first gene modifying system comprising a WT Cas9-RT fusion polypeptide and second heterologous gene modifying system comprising an exemplary heterologous gene modifying polypeptide.

[0241] FIG. 23 is a graph showing percent translocation in T cells following gene editing at the TRAC and B2M loci by a first gene modifying system comprising a WT Cas9-RT fusion polypeptide and second heterologous gene modifying system comprising an exemplary heterologous gene modifying polypeptide.

[0242] FIG. 24 is a graph showing integration and expression of a template in primary cells and in iPSCs by gene modifying systems delivered as all RNA.

[0243] FIG. 25 is pair of graphs showing BCMA CAR expression in human T cells (left) following transfection with an RTE-1 MD gene modifying system and template encoding a CAR and the % killing of tumor cells (right) when contacted with CART cells.

[0244] FIG. 26 is a graph showing CD20 CAR expression in human T cells following transfection with an RTE-1 MD gene modifying polypeptide and CD20 CAR template.

[0245] FIG. 27 is a graph showing expression of GFP, a CAR, or both in human T cells following transfection with a Vingi-1_Acar gene modifying polypeptide and a template encoding GFP, a template encoding a CAR, or both templates.

### DETAILED DESCRIPTION

[0246] This disclosure relates to compositions, systems and methods for targeting, editing, modifying or manipulating a DNA sequence (e.g., inserting a heterologous object DNA sequence into a target site of a mammalian genome) at one or more locations in a DNA sequence in a cell, tissue or subject, e.g., in vivo, in vitro or ex vivo. The object DNA sequence may include, e.g., a coding sequence, a regulatory sequence, a gene expression unit.

[0247] More specifically, the disclosure provides retrotransposon-based systems for inserting a sequence of interest into the genome. Examples of retrotransposon elements are listed, e.g., in Tables 10, 11, X, 3A, 3B, and Z1 of PCT Publication No. WO/2021/178717, incorporated herein by reference in its entirety.

[0248] In some embodiments, systems described herein can have a number of advantages relative to various earlier systems. For instance, the disclosure describes retrotransposases capable of inserting long sequences of heterologous nucleic acid into a genome. In addition, retrotransposases described herein can insert heterologous nucleic acid in an endogenous site in the genome, such as the rDNA locus. This is in contrast to Cre/loxP systems, which require a first step of inserting an exogenous loxP site before a second step of inserting a sequence of interest into the loxP site.

### Gene Modifying Polypeptides

[0249] Non-long terminal repeat (LTR) retrotransposons are a type of mobile genetic elements that are widespread in eukaryotic genomes. They include, for example, the apurinic/apyrimidinic endonuclease (APE)-type, the restriction enzyme-like endonuclease (RLE)-type, and the Penelope-like element (PLE)-type.

[0250] The APE class retrotransposons are comprised of two functional domains: an endonuclease/DNA binding domain, and a reverse transcriptase domain. Examples of APE-class retrotransposons can be found, for example, in Table 1 of PCT Application No. PCT/US2019/048607, incorporated herein by reference in its entirety, including the sequence listing and sequences referred to in Table 1 therein.

[0251] The RLE class are comprised of three functional domains: a DNA binding domain, a reverse transcription domain, and an endonuclease domain. Examples of RLE-class retrotransposons can be found, for example, in Table 2 of PCT Application No. PCT/US2019/048607, incorporated herein by reference in its entirety, including the sequence listing and sequences referred to in Table 2 therein.

[0252] The reverse transcriptase domain of non-LTR retrotransposon functions by binding an RNA sequence template and reverse transcribing it into the host genome's target DNA. The RNA sequence template has a 3′ untranslated region which is specifically bound to the retrotransposase, and a variable 5′ region generally having Open Reading Frame(s) (“ORF”) encoding retrotransposase proteins. The RNA sequence template may also comprise a 5′ untranslated region which specifically binds the retrotransposase.

[0253] Penelope-like elements (PLEs) are distinct from both LTR and non-LTR retrotransposons. PLEs generally comprise a reverse transcriptase domain distinct from that of APE and RLE elements, but similar to that of telomerases and Group II introns, and an optional GIY-YIG endonuclease domain.

[0254] Other exemplary classes of retrotransposon include, without limitation, RTE (e.g., RTE-1_MD, RTE-3_BF, and RTE-25_LMi), CR1 (e.g., CR1-1_PH), Crack (e.g., Crack-28_RF), L2 (e.g., L2-2_Dre and L2-5_GA), and Vingi (e.g., Vingi-1_Acar) retrotransposons.

[0255] As described herein, the elements of such retrotransposons can be functionally modularized and/or modified to target, edit, modify or manipulate a target DNA sequence, e.g., to insert an object (e.g., heterologous) nucleic acid sequence into a target genome, e.g., a mammalian genome, by reverse transcription. In some embodiments, a gene modifying system comprises: (A) a polypeptide or a nucleic acid encoding a polypeptide, wherein the polypeptide comprises (i) a retrotransposase reverse transcriptase domain, and (ii) a retrotransposase endonuclease domain that contains DNA binding functionality; and (B) a template RNA (or DNA encoding the template RNA) comprising (i) a sequence that binds the polypeptide and (ii) a heterologous object sequence. The RNA template element of a gene modifying system is typically heterologous to the polypeptide element and provides an object sequence to be inserted (reverse transcribed) into the host genome.

[0256] In some embodiments, the gene modifying system comprises a retrotransposase sequence of an element listed in any one of Table 10, Table 11, Table X, Table Z1 Table 3A, or 3B of PCT Pub. No.: WO/2021/178717, which are incorporated herein by reference as they relate to domains from retrotransposons.

[0257] In some embodiments, an amino acid sequence encoded by an element of Table R1 is an amino acid sequence encoded by the full length sequence of an element listed in Table R1, or a sequence having at least 75%, 80%, 85%, 90%, 95%, 96%, 97%, 98%, or 99% sequence identity thereto. In some embodiments, the full-length sequence of an element listed in Table R1 may comprise one or more (e.g., all of) of a 5′ UTR, polypeptide-encoding sequence, or 3′ UTR of a retrotransposon as described herein. In some embodiments, an amino acid sequence of Table R1 is an amino acid sequence encoded by the full length sequence of an element listed in Table R1, or a sequence having at least 75%, 80%, 85%, 90%, 95%, 96%, 97%, 98%, or 99% sequence identity thereto. In some embodiments, a 5′ UTR of an element of Table R1 comprises a 5′ UTR of the full length sequence of an element listed in Table R1, or a sequence having at least 75%, 80%, 85%, 90%, 95%, 96%, 97%, 98%, or 99% sequence identity thereto. In some embodiments, a 3′ UTR of an element of Table R1 comprises a 3′ UTR of the full length sequence of an element listed in Table R1, or a sequence having at least 75%, 80%, 85%, 90%, 95%, 96%, 97%, 98%, or 99% sequence identity thereto.

[0258] Also indicated in Table R1 are the host organisms from which the nucleic acid sequences were obtained and a listing of domains present within the polypeptide encoded by the open reading frame of the nucleic acid sequence.

[0259] In some embodiments, the gene modifying polypeptide comprises an amino acid sequence of SEQ ID NO: 400 or a sequence at least 70%, 75%, 80%, 85%, 90%, 95%, 96%, 97%, 98%, or 99% identical thereto, or a functional fragment thereof (e.g., having one or both of reverse transcriptase activity and endonuclease activity). In some embodiments, the gene modifying polypeptide comprises an amino acid sequence of SEQ ID NO: 400. In some embodiments, the sequence that binds the polypeptide comprises:
[0260] a 5′ UTR having a sequence of SEQ ID NO: 700 or a sequence at least 80%, 85%, 90%, 95%, 96%, 97%, 98%, or 99% identical thereto; and
[0261] a 3′ UTR having a sequence of SEQ ID NO: 800 or a sequence at least 80%, 85%, 90%, 95%, 96%, 97%, 98%, or 99% identical thereto.

[0262] In some embodiments, the gene modifying polypeptide comprises an amino acid sequence of SEQ ID NO: 401 or a sequence at least 70%, 75%, 80%, 85%, 90%, 95%, 96%, 97%, 98%, or 99% identical thereto, or a functional fragment thereof (e.g., having one or both of reverse transcriptase activity and endonuclease activity). In some embodiments, the gene modifying polypeptide comprises an amino acid sequence of SEQ ID NO: 401. In some embodiments, the sequence that binds the polypeptide comprises:
[0263] a 5′ UTR having a sequence of SEQ ID NO: 701 or a sequence at least 80%, 85%, 90%, 95%, 96%, 97%, 98%, or 99% identical thereto; and
[0264] a 3′ UTR having a sequence of SEQ ID NO: 801 or a sequence at least 80%, 85%, 90%, 95%, 96%, 97%, 98%, or 99% identical thereto.

[0265] In some embodiments, the gene modifying polypeptide comprises an amino acid sequence of SEQ ID NO: 402 or a sequence at least 70%, 75%, 80%, 85%, 90%, 95%, 96%, 97%, 98%, or 99% identical thereto, or a functional fragment thereof (e.g., having one or both of reverse transcriptase activity and endonuclease activity). In some embodiments, the gene modifying polypeptide comprises an amino acid sequence of SEQ ID NO: 402. In some embodiments, the sequence that binds the polypeptide comprises:
[0266] a 5′ UTR having a sequence of SEQ ID NO: 702 or a sequence at least 80%, 85%, 90%, 95%, 96%, 97%, 98%, or 99% identical thereto; and
[0267] a 3′ UTR having a sequence of SEQ ID NO: 802 or a sequence at least 80%, 85%, 90%, 95%, 96%, 97%, 98%, or 99% identical thereto.

[0268] In some embodiments, the gene modifying polypeptide comprises an amino acid sequence of SEQ ID NO: 403, or a sequence having at least 70%, 75%, 80%, 85%, 90%, 95%, 96%, 97%, 98%, or 99% identity thereto, wherein one or both of:
[0269] i) amino acid position 345 is other than D, e.g., is N, and
[0270] ii) amino acid position 523 is other than T, e.g., is S;
[0271] or a functional fragment thereof (e.g., having one or both of reverse transcriptase activity and endonuclease activity).

[0272] In some embodiments, the gene modifying polypeptide comprises an amino acid sequence of SEQ ID NO: 403, or a sequence having at least 70%, 75%, 80%, 85%, 90%, 95%, 96%, 97%, 98%, or 99% identity thereto, wherein one or both of:
[0273] i) amino acid position 345 is N, and
[0274] ii) amino acid position 523 is S;
[0275] or a functional fragment thereof (e.g., having one or both of reverse transcriptase activity and endonuclease activity).

[0276] In some embodiments, the gene modifying polypeptide comprises an amino acid sequence of SEQ ID NO: 403 or a sequence at least 70%, 75%, 80%, 85%, 90%, 95%, 96%, 97%, 98%, or 99% identical thereto, or a functional fragment thereof (e.g., having one or both of reverse transcriptase activity and endonuclease activity). In some embodiments, the gene modifying polypeptide comprises an amino acid sequence of SEQ ID NO: 403. In some embodiments, the sequence that binds the polypeptide comprises:
[0277] a 5′ UTR having a sequence of SEQ ID NO: 703 or a sequence at least 80%, 85%, 90%, 95%, 96%, 97%, 98%, or 99% identical thereto; and
[0278] a 3′ UTR having a sequence of SEQ ID NO: 803 or a sequence at least 80%, 85%, 90%, 95%, 96%, 97%, 98%, or 99% identical thereto.

[0279] In some embodiments, the gene modifying polypeptide comprises an amino acid sequence of SEQ ID NO: 404 or a sequence at least 70%, 75%, 80%, 85%, 90%, 95%, 96%, 97%, 98%, or 99% identical thereto, or a functional fragment thereof (e.g., having one or both of reverse transcriptase activity and endonuclease activity). In some embodiments, the gene modifying polypeptide comprises an amino acid sequence of SEQ ID NO: 404. In some embodiments, the sequence that binds the polypeptide comprises:
[0280] a 5′ UTR having a sequence of SEQ ID NO: 704 or a sequence at least 80%, 85%, 90%, 95%, 96%, 97%, 98%, or 99% identical thereto; and
[0281] a 3′ UTR having a sequence of SEQ ID NO: 804 or a sequence at least 80%, 85%, 90%, 95%, 96%, 97%, 98%, or 99% identical thereto.

[0282] In some embodiments, the gene modifying polypeptide comprising an amino acid sequence of SEQ ID NO: 405, or a sequence having at least 70%, 75%, 80%, 85%, 90%, 95%, 96%, 97%, 98%, or 99% identity thereto, wherein one, two, or three of:
[0283] i) amino acid position 444 is other than P, e.g., is A,
[0284] ii) amino acid position 848 is other than D, e.g., is G; and
[0285] iii) amino acid position 875 is other than T, e.g., is A
[0286] or a functional fragment thereof (e.g., having one or both of reverse transcriptase activity and endonuclease activity).

[0287] In some embodiments, the gene modifying polypeptide comprising an amino acid sequence of SEQ ID NO:405, or a sequence having at least 70%, 75%, 80%, 85%, 90%, 95%, 96%, 97%, 98%, or 99% identity thereto, wherein one, two, or three of:
[0288] i) amino acid position 444 is A,
[0289] ii) amino acid position 848 is G; and
[0290] iii) amino acid position 875 is A
[0291] or a functional fragment thereof (e.g., having one or both of reverse transcriptase activity and endonuclease activity).

[0292] In some embodiments, the gene modifying polypeptide comprises an amino acid sequence of SEQ ID NO: 405 or a sequence at least 70%, 75%, 80%, 85%, 90%, 95%, 96%, 97%, 98%, or 99% identical thereto, or a functional fragment thereof (e.g., having one or both of reverse transcriptase activity and endonuclease activity). In some embodiments, the gene modifying polypeptide comprises an amino acid sequence of SEQ ID NO: 405. In some embodiments, the sequence that binds the polypeptide comprises:
[0293] a 5′ UTR having a sequence of SEQ ID NO: 705 or a sequence at least 80%, 85%, 90%, 95%, 96%, 97%, 98%, or 99% identical thereto; and
[0294] a 3′ UTR having a sequence of SEQ ID NO: 805 or a sequence at least 80%, 85%, 90%, 95%, 96%, 97%, 98%, or 99% identical thereto.

[0295] In some embodiments, the gene modifying polypeptide comprises an amino acid sequence of SEQ ID NO: 406 or a sequence at least 70%, 75%, 80%, 85%, 90%, 95%, 96%, 97%, 98%, or 99% identical thereto, or a functional fragment thereof (e.g., having one or both of reverse transcriptase activity and endonuclease activity). In some embodiments, the gene modifying polypeptide comprises an amino acid sequence of SEQ ID NO: 406. In some embodiments, the sequence that binds the polypeptide comprises:
[0296] a 5′ UTR having a sequence of SEQ ID NO: 706 or a sequence at least 80%, 85%, 90%, 95%, 96%, 97%, 98%, or 99% identical thereto; and
[0297] a 3′ UTR having a sequence of SEQ ID NO: 806 or a sequence at least 80%, 85%, 90%, 95%, 96%, 97%, 98%, or 99% identical thereto.

[0298] In some embodiments, the gene modifying polypeptide comprises an amino acid sequence of SEQ ID NO: 407 or a sequence at least 70%, 75%, 80%, 85%, 90%, 95%, 96%, 97%, 98%, or 99% identical thereto, or a functional fragment thereof (e.g., having one or both of reverse transcriptase activity and endonuclease activity). In some embodiments, the gene modifying polypeptide comprises an amino acid sequence of SEQ ID NO: 407. In some embodiments, the sequence that binds the polypeptide comprises:
[0299] a 5′ UTR having a sequence of SEQ ID NO: 707 or a sequence at least 80%, 85%, 90%, 95%, 96%, 97%, 98%, or 99% identical thereto; and
[0300] a 3′ UTR having a sequence of SEQ ID NO: 807 or a sequence at least 80%, 85%, 90%, 95%, 96%, 97%, 98%, or 99% identical thereto.

[0301] In some embodiments, the gene modifying polypeptide comprises an amino acid sequence of SEQ ID NO: 408 or a sequence at least 70%, 75%, 80%, 85%, 90%, 95%, 96%, 97%, 98%, or 99% identical thereto, or a functional fragment thereof (e.g., having one or both of reverse transcriptase activity and endonuclease activity). In some embodiments, the gene modifying polypeptide comprises an amino acid sequence of SEQ ID NO: 408. In some embodiments, the sequence that binds the polypeptide comprises:
[0302] a 5′ UTR having a sequence of SEQ ID NO: 708 or a sequence at least 80%, 85%, 90%, 95%, 96%, 97%, 98%, or 99% identical thereto; and
[0303] a 3′ UTR having a sequence of SEQ ID NO: 808 or a sequence at least 80%, 85%, 90%, 95%, 96%, 97%, 98%, or 99% identical thereto.

[0304] In some embodiments, the gene modifying polypeptide comprises an amino acid sequence of SEQ ID NO: 409 or a sequence at least 70%, 75%, 80%, 85%, 90%, 95%, 96%, 97%, 98%, or 99% identical thereto, or a functional fragment thereof (e.g., having one or both of reverse transcriptase activity and endonuclease activity). In some embodiments, the gene modifying polypeptide comprises an amino acid sequence of SEQ ID NO: 409. In some embodiments, the sequence that binds the polypeptide comprises:
[0305] a 5′ UTR having a sequence of SEQ ID NO: 709 or a sequence at least 80%, 85%, 90%, 95%, 96%, 97%, 98%, or 99% identical thereto; and
[0306] a 3′ UTR having a sequence of SEQ ID NO: 809 or a sequence at least 80%, 85%, 90%, 95%, 96%, 97%, 98%, or 99% identical thereto.

[0307] In some embodiments, the gene modifying polypeptide comprising an amino acid sequence of SEQ ID NO: 410, or a sequence having at least 70%, 75%, 80%, 85%, 90%, 95%, 96%, 97%, 98%, or 99% identity thereto, wherein one or both of:
[0308] i) amino acid position 476 is a non-polar residue, e.g., is L, and
[0309] ii) amino acid position 524 is a non-polar residue, e.g., is L;
[0310] or a functional fragment thereof (e.g., having one or both of reverse transcriptase activity and endonuclease activity).

[0311] In some embodiments, the gene modifying polypeptide comprising an amino acid sequence of SEQ ID NO: 410, or a sequence having at least 70%, 75%, 80%, 85%, 90%, 95%, 96%, 97%, 98%, or 99% identity thereto, wherein one or both of:
[0312] i) amino acid position 476 is L, and
[0313] ii) amino acid position 524 is L;
[0314] or a functional fragment thereof (e.g., having one or both of reverse transcriptase activity and endonuclease activity).

[0315] In some embodiments, the gene modifying polypeptide comprises an amino acid sequence of SEQ ID NO: 410 or a sequence at least 70%, 75%, 80%, 85%, 90%, 95%, 96%, 97%, 98%, or 99% identical thereto, or a functional fragment thereof (e.g., having one or both of reverse transcriptase activity and endonuclease activity). In some embodiments, the gene modifying polypeptide comprises an amino acid sequence of SEQ ID NO: 410. In some embodiments, the sequence that binds the polypeptide comprises:
[0316] a 5′ UTR having a sequence of SEQ ID NO: 710 or a sequence at least 80%, 85%, 90%, 95%, 96%, 97%, 98%, or 99% identical thereto; and
[0317] a 3′ UTR having a sequence of SEQ ID NO: 810 or a sequence at least 80%, 85%, 90%, 95%, 96%, 97%, 98%, or 99% identical thereto.

[0318] In some embodiments, the gene modifying polypeptide comprises an amino acid sequence of SEQ ID NO: 420, or a sequence having at least 70%, 75%, 80%, 85%, 90%, 95%, 96%, 97%, 98%, or 99% identity thereto, wherein amino acid position 191 is other than D, e.g., is A, or a fragment thereof having reverse transcriptase activity. In some embodiments, the gene modifying polypeptide comprises an amino acid sequence of SEQ ID NO: 420, or a sequence having no more than 10, 20, 30, 40, 50, 60, 70, 80, 90, or 100 nucleotide differences thereto, wherein amino acid position 191 is other than D, e.g., is A, or a fragment thereof having reverse transcriptase activity. In some embodiments, the gene modifying polypeptide has an endonuclease activity of less than 20%, 15%, 10%, or 5% of that of a polypeptide of SEQ ID NO: 405 in an assay according to Example 4.

[0319] In certain embodiments, the gene modifying polypeptide further comprises a heterologous protein domain. In some embodiments, a linker (e.g., as described in Table L1 herein) is disposed between the heterologous protein domain and the amino acid sequence having at least 70%, 75%, 80%, 85%, 90%, 95%, 96%, 97%, 98%, or 99% identity to SEQ ID NO: 405, or fragment thereof.

[0320] In some embodiments, the gene modifying polypeptide comprises an amino acid sequence of SEQ ID NO: 421, or a sequence having at least 70%, 75%, 80%, 85%, 90%, 95%, 96%, 97%, 98%, or 99% identity thereto, wherein amino acid position 191 is other than D, e.g., is A, or a fragment thereof having reverse transcriptase activity. In some embodiments, the gene modifying polypeptide comprises an amino acid sequence of SEQ ID NO: 421, or a sequence having no more than 10, 20, 30, 40, 50, 60, 70, 80, 90, or 100 nucleotide differences thereto, wherein amino acid position 191 is other than D, e.g., is A, or a fragment thereof having reverse transcriptase activity. In some embodiments, the gene modifying polypeptide has an endonuclease activity of less than 20%, 15%, 10%, or 5% of that of a polypeptide of SEQ ID NO: 406 in an assay according to Example 4.

[0321] In certain embodiments, the gene modifying polypeptide further comprises a heterologous protein domain. In some embodiments, a linker (e.g., as described in Table L1 herein) is disposed between the heterologous protein domain and the amino acid sequence having at least 70%, 75%, 80%, 85%, 90%, 95%, 96%, 97%, 98%, or 99% identity to SEQ ID NO: 406, or fragment thereof.

[0322] Table R1 provides gene modifying polypeptides comprising retrotransposon elements, altered for improved efficiency of integration into the human genome. Retrotransposase polypeptides were improved through consensus mapping to re-derive the optimal amino acid sequence. Template molecules for use with cognate retrotransposase enzymes were mapped back to their host genomes and flanking genomic DNA used to elucidate target site motifs. When detectable, conserved sequence motifs from the flanking genomic DNA of endogenous occurrences of an element were aligned to the human genome, and new sequences were derived from the human genome as 5′ or 3′ “Human Homology Arms.” In some embodiments, a template RNA described herein comprises one or both of a first homology domain comprising a sequence of a 5′ Human Homology Arm of Table R1 (or a sequence having at least 80%, 85%, 90%, 95%, 96%, 97%, 98%, or 99% identity thereto) and a second homology domain comprising a sequence of a 3′ Human Homology Arm of Table R1 (or a sequence having at least 80%, 85%, 90%, 95%, 96%, 97%, 98%, or 99% identity thereto).

TABLE R1
Retrotransposase systems with improved integration activity

| | | | | Consensus | | | | |
|---|---|---|---|---|---|---|---|---|
| | | | | Optimized | 5′ Human | 3′ Human | | |
| | | | Target | Protein | Homology | Homology | | |
| Element | Organism | Domains | Motif | Sequence | Arm | Arm | 5′ UTR | 3′ UTR |
| L2-2_DRe | Danio | RT and | TGAGCA | (SEQ ID NO: 400) | (SEQ ID | a | (SEQ | (SEQ ID |
| (1) | rerio | EN | CGGTAG | MCFLIPVVTNTR | NO: 500) | | ID NO: | NO: |
| | | | CATTAG | KTREVRCRRNP | GTTTCGC | | 700) | 800) |
| | | | TCGa | HNLRSIHVSTIS | GTCGTCC | | GCAG | TAATC |
| | | | (SEQ ID | QLSLSVGLWNC | GCCTCA | | GAGA | TGCAA |
| | | | NO: | QSAVNKADFITS | GTTTCGG | | AGCA | TTGCC |
| | | | 15405) | IATYSDYNLMA | CCCTTGT | | CTTTA | TCTCT |
| | | | | LTETWLRPEDT | TTTGACT | | GCAG | GAATA |
| | | | | ATHATLSANFSF | CGGGAG | | CATC | TCACA |
| | | | | SHTPRQTGRGG | GCGTGTC | | TAGA | CTAAC |
| | | | | GTGLLISKEWKF | CAAACG | | ACAG | TGTAC |
| | | | | TLIPSLPTISSFEF | CCAGGT | | CAGC | CCAAA |
| | | | | HAVTIIHPFYIN | AACCAC | | CTGT | AAAA |
| | | | | VVVIYRPPGKL | TATATAG | | AAGT | AAAA |
| | | | | GHFLDELDVLL | TGAGCA | | ACAT | AAAA |
| | | | | SSFSNFATPLLV | CGGTAG | | TTAA | AAAA |
| | | | | LGDFNIYVDKP | CATTAGT | | GATT | AAAA |
| | | | | QAADFQTLLAS | CG | | TGTTT | AAATA |
| | | | | FDLKRAPTSAT | | | CAGT | AAAA |
| | | | | HKSGNQLDLIY | | | TGTT | WACT |
| | | | | TRHCFTDQTIVT | | | GTGT | ACTAA |
| | | | | PLQISDHFLLSL | | | ATGG | TACTT |
| | | | | NIHITPEPPHTPT | | | TTTG | CCCTT |
| | | | | LVTFRRNLRSLS | | | AGGA | CTTAG |
| | | | | PNRLSTIVSDSL | | | CTTGT | ACTTT |
| | | | | PPSRKLTALDSN | | | TTCC | ACAGA |
| | | | | SATNTLCSTLAS | | | AGCT | CCTGA |
| | | | | CLDRLCPLASRP | | | GTTT | AACTT |
| | | | | ARASPPAPWLS | | | GTGT | GCCTA |
| | | | | DALREHRSKLR | | | AAAG | TAGCA |
| | | | | AAERIWRKTKN | | | TTGT | CTTAT |
| | | | | PAHLLTYQTLLS | | | AGGA | TCATT |
| | | | | SFSAEVTSAKQT | | | CATTT | GTTGC |
| | | | | YYRLKINNATN | | | AAAC | TCTTA |
| | | | | PRLLFKTFSSLL | | | TTGCT | GTTGT |
| | | | | YPPPPPASSTLT | | | TTCA | GTAAA |
| | | | | TDDFATFFCTKT | | | GTTG | TTGCT |
| | | | | AKISAQFAAPTT | | | TGTA | TCCTT |
| | | | | NTQDTTPTPHTL | | | TAAT | GTCCT |
| | | | | TSFSQLSESEVS | | | ACTA | CATTT |
| | | | | KLVLSSHATTCP | | | GAAG | GTAAG |
| | | | | LDPIPSHLLQAIS | | | TTGTT | TCGCT |
| | | | | PAVIPTLTHIINT | | | TAGC | TTGGA |
| | | | | SLDSGLFPTTFK | | | CACT | TAAAA |
| | | | | QARVTPLLKKP | | | GTTTC | GCGTC |
| | | | | NLDHTLLENYR | | | CTTG | TGCTA |
| | | | | PVSLLPFMAKIL | | | GTTA | AATGA |
| | | | | EKVVFNQVLDF | | | CTAT | CTAAA |
| | | | | LTQNNLMDNK | | | AAGA | TGTAA |
| | | | | QSGFKKGHSTE | | | GCTT | ATGTA |
| | | | | TALLSVVEDLR | | | GTGT | AATGT |
| | | | | LAKADSKSSVLI | | | AGCG | |
| | | | | LLDLSAAFDTV | | | AACG | |
| | | | | NHQILLSTLESL | | | CAGA | |
| | | | | GVAGTVIQWFR | | | CGCG | |
| | | | | SYLSDRSFRVS | | | GTTC | |
| | | | | WRGEVSNLQHL | | | GCGT | |
| | | | | NTGVPQGSVLG | | | CGTC | |
| | | | | PLLFSIYTSSLGP | | | CGCC | |
| | | | | VIQRHGFSYHC | | | TCAG | |
| | | | | YADDTQLYLSF | | | TTTCG | |
| | | | | HPDDPSVPARIS | | | GCCC | |
| | | | | ACLLDISHWMK | | | TTGTT | |
| | | | | DHHLQLNLAKT | | | TTGA | |
| | | | | EMLVVSANPTL | | | CTCG | |
| | | | | HHNFSIQMDGA | | | GGAG | |
| | | | | TITASKMVKSL | | | GCGT | |
| | | | | GVTIDDQLNFSD | | | GTCC | |
| | | | | HISRTARSCRFA | | | AAAC | |
| | | | | LYNIRKIRPFLSE | | | GCCA | |
| | | | | HAAQLLVQALV | | | GGTA | |
| | | | | LSKLDYCNSLL | | | ACCA | |
| | | | | AGLPANSIKPLQ | | | CTAT | |
| | | | | LLQNAAARVVF | | | ATAG | |
| | | | | NEPKRAHVTPL | | | TGAG | |
| | | | | LVRLHWLPVAA | | | CACG | |
| | | | | RIKFKTLMFAY | | | GTAG | |
| | | | | KVTSGLAPSYL | | | CATT | |
| | | | | HSLLQIYVPSRN | | | AGTC | |
| | | | | LRSVNERRLVV | | | GGCA | |
| | | | | PSQRGKKSLSRT | | | GGAG | |
| | | | | LTLNLPSWWNE | | | AAGC | |
| | | | | LPNCIRTAESLAI | | | ACTTT | |
| | | | | FKKRLKTQLFSL | | | AGCA | |
| | | | | HFTS | | | GCAT | |
| | | | | | | | CTAG | |
| | | | | | | | AACA | |
| | | | | | | | GCAG | |
| | | | | | | | CCTG | |
| | | | | | | | TAAG | |
| | | | | | | | TACA | |
| | | | | | | | TTTA | |
| | | | | | | | AGAT | |
| | | | | | | | TTGTT | |
| | | | | | | | TCAG | |
| | | | | | | | TTGTT | |
| | | | | | | | GTGT | |
| | | | | | | | ATGG | |
| | | | | | | | TTTG | |
| | | | | | | | AGGA | |
| | | | | | | | CTTGT | |
| | | | | | | | TTCC | |
| | | | | | | | AGCT | |
| | | | | | | | GTTT | |
| | | | | | | | GTGT | |
| | | | | | | | AAAG | |
| | | | | | | | TTGT | |
| | | | | | | | AGGA | |
| | | | | | | | CATTT | |
| | | | | | | | AAAC | |
| | | | | | | | TTGCT | |
| | | | | | | | TTCA | |
| | | | | | | | GTTG | |
| | | | | | | | TGTA | |
| | | | | | | | TAAT | |
| | | | | | | | ACTA | |
| | | | | | | | GAAG | |
| | | | | | | | TTGTT | |
| | | | | | | | TAGC | |
| | | | | | | | CACT | |
| | | | | | | | GTTTC | |
| | | | | | | | CTTG | |
| | | | | | | | GTTA | |
| | | | | | | | CTAT | |
| | | | | | | | AAGA | |
| | | | | | | | GCTT | |
| | | | | | | | GTGT | |
| | | | | | | | AGCG | |
| | | | | | | | AACG | |
| | | | | | | | CAGA | |
| | | | | | | | CGCG | |
| | | | | | | | GTTC | |
| | | | | | | | GCGT | |
| | | | | | | | CGTC | |
| | | | | | | | CGCC | |
| | | | | | | | TCAG | |
| | | | | | | | TTTCG | |
| | | | | | | | GCCC | |
| | | | | | | | TTGTT | |
| | | | | | | | TTGA | |
| | | | | | | | CTCG | |
| | | | | | | | GGAG | |
| | | | | | | | GCGT | |
| | | | | | | | GTCC | |
| | | | | | | | AAAC | |
| | | | | | | | GCCA | |
| | | | | | | | GGTA | |
| | | | | | | | ACCA | |
| | | | | | | | CTAT | |
| | | | | | | | ATAG | |
| | | | | | | | TGAG | |
| | | | | | | | CACG | |
| | | | | | | | GTAG | |
| | | | | | | | CATT | |
| | | | | | | | AGTC | |
| | | | | | | | GGCA | |
| | | | | | | | GGAG | |
| | | | | | | | AAGC | |
| | | | | | | | ACTTT | |
| | | | | | | | AGCA | |
| | | | | | | | GCAT | |
| | | | | | | | CTAG | |
| | | | | | | | AACA | |
| | | | | | | | GCAG | |
| | | | | | | | CCTG | |
| | | | | | | | TAAG | |
| | | | | | | | TACA | |
| | | | | | | | TTTA | |
| | | | | | | | AGAT | |
| | | | | | | | TTGTT | |
| | | | | | | | TCAG | |
| | | | | | | | TTGTT | |
| | | | | | | | GTGT | |
| | | | | | | | ATGG | |
| | | | | | | | TTTG | |
| | | | | | | | AGGA | |
| | | | | | | | CTTGT | |
| | | | | | | | TTCC | |
| | | | | | | | AGCT | |
| | | | | | | | GTTT | |
| | | | | | | | GTGT | |
| | | | | | | | AAAG | |
| | | | | | | | TTGT | |
| | | | | | | | AGGA | |
| | | | | | | | CATTT | |
| | | | | | | | AAAC | |
| | | | | | | | TTGCT | |
| | | | | | | | TTCA | |
| | | | | | | | GTTG | |
| | | | | | | | TGTA | |
| | | | | | | | TAAT | |
| | | | | | | | ACTA | |
| | | | | | | | GAAG | |
| | | | | | | | TTGTT | |
| | | | | | | | TAGC | |
| | | | | | | | CACT | |
| | | | | | | | GTTTC | |
| | | | | | | | CTTG | |
| | | | | | | | GTTA | |
| | | | | | | | CTAT | |
| | | | | | | | AAGA | |
| | | | | | | | GCTT | |
| | | | | | | | GTGT | |
| | | | | | | | AGCG | |
| | | | | | | | AACG | |
| | | | | | | | CAGA | |
| | | | | | | | CGCG | |
| | | | | | | | GTTC | |
| | | | | | | | GCGT | |
| | | | | | | | CGTC | |
| | | | | | | | CGCC | |
| | | | | | | | TCAG | |
| | | | | | | | TTTCG | |
| | | | | | | | GCCC | |
| | | | | | | | TTGTT | |
| | | | | | | | TTGA | |
| | | | | | | | CTCTC | |
| | | | | | | | GAGG | |
| | | | | | | | CGTG | |
| | | | | | | | TCCA | |
| | | | | | | | GCTG | |
| | | | | | | | AATT | |
| | | | | | | | CAAT | |
| | | | | | | | CAGC | |
| | | | | | | | TAGT | |
| | | | | | | | GCTTT | |
| | | | | | | | GGGG | |
| | | | | | | | TTAT | |
| | | | | | | | ATAA | |
| | | | | | | | ACAA | |
| | | | | | | | CTAG | |
| | | | | | | | TTCA | |
| | | | | | | | CCGC | |
| | | | | | | | GGCA | |
| | | | | | | | GCGG | |
| | | | | | | | TCGC | |
| | | | | | | | GGCA | |
| | | | | | | | GCCT | |
| | | | | | | | CGTG | |
| | | | | | | | TGAA | |
| | | | | | | | GACC | |
| | | | | | | | GACG | |
| | | | | | | | AGGG | |
| | | | | | | | TAAA | |
| | | | | | | | GACC | |
| | | | | | | | ATCG | |
| | | | | | | | ACTC | |
| | | | | | | | TACC | |
| | | | | | | | TGCG | |
| | | | | | | | CGAC | |
| | | | | | | | TCCA | |
| | | | | | | | CCGA | |
| | | | | | | | GCAA | |
| | | | | | | | AGAC | |
| | | | | | | | ACCG | |
| | | | | | | | ACAA | |
| | | | | | | | AGCA | |
| | | | | | | | CTTG | |
| | | | | | | | AGTA | |
| | | | | | | | CTTTA | |
| | | | | | | | CTGT | |
| | | | | | | | ATTG | |
| | | | | | | | TTTTA | |
| | | | | | | | CTTTA | |
| | | | | | | | CACT | |
| | | | | | | | TATTT | |
| | | | | | | | TTTGT | |
| | | | | | | | TGTC | |
| | | | | | | | AGTG | |
| | | | | | | | CACT | |
| | | | | | | | TTTAT | |
| | | | | | | | T | |
| L2-2_Dre | Danio | RT and | TGAGCA | (SEQ ID NO: 401) | (SEQ ID | a | (SEQ | (SEQ ID |
| (2) | rerio | EN | CGGTAG | MCFLIPVVTNTR | NO: 500) | | ID NO: | NO: |
| | | | CATTAG | KTREVRCRRNP | GTTTCGC | | 701) | 801) |
| | | | TCGa | HNLRSIHVSTIS | GTCGTCC | | GCAG | TAATC |
| | | | (SEQ ID | QLSLSVGLWNC | GCCTCA | | GAGA | TGCAA |
| | | | NO: | QSAVNKADFITS | GTTTCGG | | AGCA | TTGCC |
| | | | 15405) | IATYSDYNLMA | CCCTTGT | | CTTTA | TCTCT |
| | | | | LTETWLRPEDT | TTTGACT | | GCAG | GAATA |
| | | | | ATHATLSANFSF | CGGGAG | | CATC | TCACA |
| | | | | SHTPRQTGRGG | GCGTGTC | | TAGA | CTAAC |
| | | | | GTGLLISKEWKF | CAAACG | | ACAG | TGTAC |
| | | | | TLIPSLPTISSFEF | CCAGGT | | CAGC | CCAAA |
| | | | | HAVTIIHPFYIN | AACCAC | | CTGT | AAAA |
| | | | | VVVIYRPPGKL | TATATAG | | AAGT | AAAA |
| | | | | GHFLDELDVLL | TGAGCA | | ACAT | AAAA |
| | | | | SSFSNFATPLLV | CGGTAG | | TTAA | AAAA |
| | | | | LGDFNIYVDKP | CATTAGT | | GATT | AAAA |
| | | | | QAADFQTLLAS | CG | | TGTTT | AAATA |
| | | | | FDLKRAPTSAT | | | CAGT | AAAA |
| | | | | HKSGNQLDLIY | | | TGTT | WACT |
| | | | | TRHCFTDQTIVT | | | GTGT | ACTAA |
| | | | | PLQISDHFLLSL | | | ATGG | TACTT |
| | | | | NIHITPEPPHTPT | | | TTTG | CCCTT |
| | | | | LVTFRRNLRSLS | | | AGGA | CTTAG |
| | | | | PNRLSTIVSDSL | | | CTTGT | ACTTT |
| | | | | PPSRKLTALDSN | | | TTCC | ACAGA |
| | | | | SATNTLCSTLAS | | | AGCT | CCTGA |
| | | | | CLDRLCPLASRP | | | GTTT | AACTT |
| | | | | ARASPPAPWLS | | | GTGT | GCCTA |
| | | | | DALREHRSKLR | | | AAAG | TAGCA |
| | | | | AAERIWRKTKN | | | TTGT | CTTAT |
| | | | | PAHLLTYQTLLS | | | AGGA | TCATT |
| | | | | SFSAEVTSAKQT | | | CATTT | GTTGC |
| | | | | YYRLKINNATN | | | AAAC | TCTTA |
| | | | | PRLLFKTFSSLL | | | TTGCT | GTTGT |
| | | | | YPPPPPASSTLT | | | TTCA | GTAAA |
| | | | | TDDFATFFCTKT | | | GTTG | TTGCT |
| | | | | AKISAQFAAPTT | | | TGTA | TCCTT |
| | | | | NTQDTTPTPHTL | | | TAAT | GTCCT |
| | | | | TSFSQLSESEVS | | | ACTA | CATTT |
| | | | | KLVLSSHATTCP | | | GAAG | GTAAG |
| | | | | LDPIPSHLLQAIS | | | TTGTT | TCGCT |
| | | | | PAVIPTLTHIINT | | | TAGC | TTGGA |
| | | | | SLDSGLFPTTFK | | | CACT | TAAAA |
| | | | | QARVTPLLKKP | | | GTTTC | GCGTC |
| | | | | NLDHTLLENYR | | | CTTG | TGCTA |
| | | | | PVSLLPFMAKIL | | | GTTA | AATGA |
| | | | | EKVVFNQVLDF | | | CTAT | CTAAA |
| | | | | LTQNNLMDNK | | | AAGA | TGTAA |
| | | | | QSGFKKGHSTE | | | GCTT | ATGTA |
| | | | | TALLSVVEDLR | | | GTGT | AATGT |
| | | | | LAKADSKSSVLI | | | AGCG | |
| | | | | LLDLSAAFDTV | | | AACG | |
| | | | | NHQILLSTLESL | | | CAGA | |
| | | | | GVAGTVIQWFR | | | CGCG | |
| | | | | SYLSDRSFRVS | | | GTTC | |
| | | | | WRGEVSNLQHL | | | GCGT | |
| | | | | NTGVPQGSVLG | | | CGTC | |
| | | | | PLLFSIYTSSLGP | | | CGCC | |
| | | | | VIQRHGFSYHC | | | TCAG | |
| | | | | YADDTQLYLSF | | | TTTCG | |
| | | | | HPDDPSVPARIS | | | GCCC | |
| | | | | ACLLDISHWMK | | | TTGTT | |
| | | | | DHHLQLNLAKT | | | TTGA | |
| | | | | EMLVVSANPTL | | | CTCG | |
| | | | | HHNFSIQMDGA | | | GGAG | |
| | | | | TITASKMVKSL | | | GCGT | |
| | | | | GVTIDDQLNFSD | | | GTCC | |
| | | | | HISRTARSCRFA | | | AAAC | |
| | | | | LYNIRKIRPFLSE | | | GCCA | |
| | | | | HAAQLLVQALV | | | GGTA | |
| | | | | LSKLDYCNSLL | | | ACCA | |
| | | | | AGLPANSIKPLQ | | | CTAT | |
| | | | | LLQNAAARVVF | | | ATAG | |
| | | | | NEPKRAHVTPL | | | TGAG | |
| | | | | LVRLHWLPVAA | | | CACG | |
| | | | | RIKFKALMFAY | | | GTAG | |
| | | | | KVTSGLAPSYLL | | | CATT | |
| | | | | SLLQIYVPSRNL | | | AGTC | |
| | | | | RSVNERRLVVP | | | GGCA | |
| | | | | SQRGKKSLSRTL | | | GGAG | |
| | | | | TLNLPSWWNEL | | | AAGC | |
| | | | | PNCIRTAESLAIF | | | ACTTT | |
| | | | | KKRLKTQLFSL | | | AGCA | |
| | | | | HFTS | | | GCAT | |
| | | | | | | | CTAG | |
| | | | | | | | AACA | |
| | | | | | | | GCAG | |
| | | | | | | | CCTG | |
| | | | | | | | TAAG | |
| | | | | | | | TACA | |
| | | | | | | | TTTA | |
| | | | | | | | AGAT | |
| | | | | | | | TTGTT | |
| | | | | | | | TCAG | |
| | | | | | | | TTGTT | |
| | | | | | | | GTGT | |
| | | | | | | | ATGG | |
| | | | | | | | TTTG | |
| | | | | | | | AGGA | |
| | | | | | | | CTTGT | |
| | | | | | | | TTCC | |
| | | | | | | | AGCT | |
| | | | | | | | GTTT | |
| | | | | | | | GTGT | |
| | | | | | | | AAAG | |
| | | | | | | | TTGT | |
| | | | | | | | AGGA | |
| | | | | | | | CATTT | |
| | | | | | | | AAAC | |
| | | | | | | | TTGCT | |
| | | | | | | | TTCA | |
| | | | | | | | GTTG | |
| | | | | | | | TGTA | |
| | | | | | | | TAAT | |
| | | | | | | | ACTA | |
| | | | | | | | GAAG | |
| | | | | | | | TTGTT | |
| | | | | | | | TAGC | |
| | | | | | | | CACT | |
| | | | | | | | GTTTC | |
| | | | | | | | CTTG | |
| | | | | | | | GTTA | |
| | | | | | | | CTAT | |
| | | | | | | | AAGA | |
| | | | | | | | GCTT | |
| | | | | | | | GTGT | |
| | | | | | | | AGCG | |
| | | | | | | | AACG | |
| | | | | | | | CAGA | |
| | | | | | | | CGCG | |
| | | | | | | | GTTC | |
| | | | | | | | GCGT | |
| | | | | | | | CGTC | |
| | | | | | | | CGCC | |
| | | | | | | | TCAG | |
| | | | | | | | TTTCG | |
| | | | | | | | GCCC | |
| | | | | | | | TTGTT | |
| | | | | | | | TTGA | |
| | | | | | | | CTCG | |
| | | | | | | | GGAG | |
| | | | | | | | GCGT | |
| | | | | | | | GTCC | |
| | | | | | | | AAAC | |
| | | | | | | | GCCA | |
| | | | | | | | GGTA | |
| | | | | | | | ACCA | |
| | | | | | | | CTAT | |
| | | | | | | | ATAG | |
| | | | | | | | TGAG | |
| | | | | | | | CACG | |
| | | | | | | | GTAG | |
| | | | | | | | CATT | |
| | | | | | | | AGTC | |
| | | | | | | | GGCA | |
| | | | | | | | GGAG | |
| | | | | | | | AAGC | |
| | | | | | | | ACTTT | |
| | | | | | | | AGCA | |
| | | | | | | | GCAT | |
| | | | | | | | CTAG | |
| | | | | | | | AACA | |
| | | | | | | | GCAG | |
| | | | | | | | CCTG | |
| | | | | | | | TAAG | |
| | | | | | | | TACA | |
| | | | | | | | TTTA | |
| | | | | | | | AGAT | |
| | | | | | | | TTGTT | |
| | | | | | | | TCAG | |
| | | | | | | | TTGTT | |
| | | | | | | | GTGT | |
| | | | | | | | ATGG | |
| | | | | | | | TTTG | |
| | | | | | | | AGGA | |
| | | | | | | | CTTGT | |
| | | | | | | | TTCC | |
| | | | | | | | AGCT | |
| | | | | | | | GTTT | |
| | | | | | | | GTGT | |
| | | | | | | | AAAG | |
| | | | | | | | TTGT | |
| | | | | | | | AGGA | |
| | | | | | | | CATTT | |
| | | | | | | | AAAC | |
| | | | | | | | TTGCT | |
| | | | | | | | TTCA | |
| | | | | | | | GTTG | |
| | | | | | | | TGTA | |
| | | | | | | | TAAT | |
| | | | | | | | ACTA | |
| | | | | | | | GAAG | |
| | | | | | | | TTGTT | |
| | | | | | | | TAGC | |
| | | | | | | | CACT | |
| | | | | | | | GTTTC | |
| | | | | | | | CTTG | |
| | | | | | | | GTTA | |
| | | | | | | | CTAT | |
| | | | | | | | AAGA | |
| | | | | | | | GCTT | |
| | | | | | | | GTGT | |
| | | | | | | | AGCG | |
| | | | | | | | AACG | |
| | | | | | | | CAGA | |
| | | | | | | | CGCG | |
| | | | | | | | GTTC | |
| | | | | | | | GCGT | |
| | | | | | | | CGTC | |
| | | | | | | | CGCC | |
| | | | | | | | TCAG | |
| | | | | | | | TTTCG | |
| | | | | | | | GCCC | |
| | | | | | | | TTGTT | |
| | | | | | | | TTGA | |
| | | | | | | | CTCTC | |
| | | | | | | | GAGG | |
| | | | | | | | CGTG | |
| | | | | | | | TCCA | |
| | | | | | | | GCTG | |
| | | | | | | | AATT | |
| | | | | | | | CAAT | |
| | | | | | | | CAGC | |
| | | | | | | | TAGT | |
| | | | | | | | GCTTT | |
| | | | | | | | GGGG | |
| | | | | | | | TTAT | |
| | | | | | | | ATAA | |
| | | | | | | | ACAA | |
| | | | | | | | CTAG | |
| | | | | | | | TTCA | |
| | | | | | | | CCGC | |
| | | | | | | | GGCA | |
| | | | | | | | GCGG | |
| | | | | | | | TCGC | |
| | | | | | | | GGCA | |
| | | | | | | | GCCT | |
| | | | | | | | CGTG | |
| | | | | | | | TGAA | |
| | | | | | | | GACC | |
| | | | | | | | GACG | |
| | | | | | | | AGGG | |
| | | | | | | | TAAA | |
| | | | | | | | GACC | |
| | | | | | | | ATCG | |
| | | | | | | | ACTC | |
| | | | | | | | TACC | |
| | | | | | | | TGCG | |
| | | | | | | | CGAC | |
| | | | | | | | TCCA | |
| | | | | | | | CCGA | |
| | | | | | | | GCAA | |
| | | | | | | | AGAC | |
| | | | | | | | ACCG | |
| | | | | | | | ACAA | |
| | | | | | | | AGCA | |
| | | | | | | | CTTG | |
| | | | | | | | AGTA | |
| | | | | | | | CTTTA | |
| | | | | | | | CTGT | |
| | | | | | | | ATTG | |
| | | | | | | | TTTTA | |
| | | | | | | | CTTTA | |
| | | | | | | | CACT | |
| | | | | | | | TATTT | |
| | | | | | | | TTTGT | |
| | | | | | | | TGTC | |
| | | | | | | | AGTG | |
| | | | | | | | CACT | |
| | | | | | | | TTTAT | |
| | | | | | | | T | |
| RTE-1_MD | Mono- | L1-EN, | NA | (SEQ ID NO: 402) | | | (SEQ | (SEQ ID |
| (1) | delphis | RT, ZF | | MDSTAHPNQGR | | | ID NO: | NO: |
| | domestica | | | GLEKVSQTLPA | | | 702) | 802) |
| | | | | LQTPGQHTAAG | | | gggtgta | tgaaact |
| | | | | GSSPLSGRNQR | | | tggggtg | gcacaaa |
| | | | | KNTKKLLLGAW | | | ctcaggg | gacaata |
| | | | | NIRTLLDRENTP | | | aggggta | gtcattc |
| | | | | RPERRTALIGKE | | | gtatctc | tcgatca |
| | | | | LARYNIDIAALS | | | tggtatg | ccgagag |
| | | | | ETRLPEEGSLSE | | | gagggct | actacca |
| | | | | PTTGYTFFWKG | | | tgtcgtg | ct |
| | | | | RASNEDRIHGV | | | ccctcct | |
| | | | | GLAIKTSLLKQL | | | agggcag | |
| | | | | PDLPVGISERLM | | | ctctcca | |
| | | | | KIRLPLSKDRYA | | | gcctctg | |
| | | | | TIISAYAPTLTST | | | accccca | |
| | | | | EETIEQFYSDLS | | | cctgaca | |
| | | | | AVLHSVPTNDK | | | cccagct | |
| | | | | LILLGDFNARVG | | | ctcactt | |
| | | | | QDHERWKGVL | | | gtggctc | |
| | | | | GKHGVGKMNN | | | ccagtag | |
| | | | | NGLLLLSKCSEF | | | ctgctag | |
| | | | | ELTITNTVFRMA | | | catgtgg | |
| | | | | NKYKTTWMHP | | | cagcggc | |
| | | | | RSKQWHLIDYII | | | cacaccc | |
| | | | | VRRRDIQDVKIT | | | cgggca | |
| | | | | RAMRGAECWT | | | acggctt | |
| | | | | DHRLVRATLQM | | | cgacag | |
| | | | | RIAPRHPKRAQT | | | gccggct | |
| | | | | VRAFYNVSRLR | | | aaacctt | |
| | | | | DPSYLQTFQSCL | | | gtgaggg | |
| | | | | DDKLSAKGPLT | | | tagccat | |
| | | | | GSSTEKWNQFR | | | cgggtca | |
| | | | | DAVKETSKAVL | | | tegaccc | |
| | | | | GPKQRNHQDW | | | ctggtga | |
| | | | | FDENNTAIEDLL | | | accagg | |
| | | | | SKKNKAFMEW | | | gctttgc | |
| | | | | QNNPNSAPKKD | | | tcaccca | |
| | | | | RFKSLQATAQR | | | gcatgtg | |
| | | | | EIRKMQDRWW | | | aagactg | |
| | | | | EKKAEEIQRFAD | | | cttcggc | |
| | | | | MKNYKQFFSAL | | | tgaacag | |
| | | | | KTVYGPLKPTT | | | acggaag | |
| | | | | TPLLSSDGDTLI | | | aaaccaa | |
| | | | | KDKKGISNRWK | | | taagaag | |
| | | | | EHFSQLLNRPSS | | | gttcaac | |
| | | | | VDQSALDQIPQ | | | ggctgag | |
| | | | | NRTIEQLDVPPSI | | | agggcg | |
| | | | | EEVQKAIKQMS | | | acgcagc | |
| | | | | AGKAPGKDGIP | | | aaagcac | |
| | | | | TEVYKALNGKA | | | tgtggag | |
| | | | | LQAFHIVLTSIW | | | tgcttag | |
| | | | | EEEDMPPELRD | | | ggcgtgt | |
| | | | | ASIVALYKNKG | | | tggagca | |
| | | | | SRAACDNYRGI | | | caaagga | |
| | | | | SLLSTAGKILAR | | | caacacg | |
| | | | | VILNRLLSSVSE | | | gccatcc | |
| | | | | QNLPESQCGFRP | | | aatgcag | |
| | | | | DRSTIDMVFTV | | | ctgagga | |
| | | | | RQMQEKCLEQN | | | agtctcc | |
| | | | | LSLYIVFIDLTK | | | agatgta | |
| | | | | AFDTVNRDALW | | | acaattt | |
| | | | | VILSKLGCPAKF | | | ttcgtgc | |
| | | | | VKLIQLFHVDM | | | cactgga | |
| | | | | TGEVLSGGETS | | | cccaggc | |
| | | | | DRFNISNGVKQ | | | ttccaac | |
| | | | | GCVLAPVLFNL | | | gccgaga | |
| | | | | FFTQVLRHAVM | | | gagtggg | |
| | | | | DLDLGVYIKYR | | | actgtct | |
| | | | | LDGSLFDLRRLT | | | ctgtgca | |
| | | | | AKTKTTERLILE | | | tcggctt | |
| | | | | ALFADDCALMA | | | ttccact | |
| | | | | HQENHLQTIVD | | | taaatct | |
| | | | | RFSTATKLFGLT | | | ctttcac | |
| | | | | ISLSKTEVLFQP | | | gcacaag | |
| | | | | APGRPTNQPCIT | | | tatcttt | |
| | | | | IDGTQLSNVNTF | | | gtgcaca | |
| | | | | KYLGSTIANDGS | | | ctcatct | |
| | | | | LDHEINARIQKA | | | atcctaa | |
| | | | | SQALGRLRCKV | | | ccccgtc | |
| | | | | LQHRGVSTATK | | | caccctc | |
| | | | | LKVYNAVVLSS | | | ttcaaga | |
| | | | | LLYGCETWTLY | | | cctgcgg | |
| | | | | RKHMKQLEQFH | | | cgatggg | |
| | | | | QRSLRSIMRIRW | | | ggagtgg | |
| | | | | QDRITNQEVLD | | | cgacgca | |
| | | | | RANSTSIEVMVL | | | acaggtg | |
| | | | | KTQLRWSGHVI | | | gaggtga | |
| | | | | RMDPQRIPRQV | | | ccactgg | |
| | | | | FYGELSAGLRK | | | cagttgt | |
| | | | | QGRPKKRFKDQ | | | agtcacg | |
| | | | | LKSNLKWAGIT | | | atcctgc | |
| | | | | PKQLELAASDR | | | acgtagg | |
| | | | | SSWRTHINHAA | | | cggccca | |
| | | | | TTFEDERRRRLA | | | cggacca | |
| | | | | AARERRHQATT | | | gtggtcg | |
| | | | | APPVTTGVPCP | | | ctcggcc | |
| | | | | MCHKLCASAFG | | | ctgtggg | |
| | | | | LQSHMRVHRR | | | cagcagg | |
| | | | | | | | gacgttc | |
| | | | | | | | ggcagca | |
| | | | | | | | tcctggg | |
| | | | | | | | cgactga | |
| | | | | | | | gcagccc | |
| | | | | | | | tctctag | |
| RTE-1_MD | Mono- | L1-EN, | NA | (SEQ ID NO: 403) | | | (SEQ | (SEQ ID |
| (2) | delphis | RT, ZF | | MDSTAHPNQGR | | | ID NO: | NO: |
| | domestica | | | GLEKVSQTLPA | | | 703) | 803) |
| | | | | LQTPGQHTAAG | | | gggtgta | tgaaact |
| | | | | GSSPLSGRNQR | | | tggggtg | gcacaaa |
| | | | | KNTKKLLLGAW | | | ctcaggg | gacaata |
| | | | | NIRTLLDRENTP | | | aggggta | gtcattc |
| | | | | RPERRTALIGKE | | | gtatctc | tcgatca |
| | | | | LARYNIDIAALS | | | tggtatg | ccgagag |
| | | | | ETRLPEEGSLSE | | | gagggct | actacca |
| | | | | PTTGYTFFWKG | | | tgtcgtg | ct |
| | | | | RASNEDRIHGV | | | ccctcct | |
| | | | | GLAIKTSLLKQL | | | agggcag | |
| | | | | PDLPVGISERLM | | | ctctcca | |
| | | | | KIRLPLSKDRYA | | | gcctctg | |
| | | | | TIISAYAPTLTST | | | accccca | |
| | | | | EETIEQFYSDLS | | | cctgaca | |
| | | | | AVLHSVPTNDK | | | cccagct | |
| | | | | LILLGDFNARVG | | | ctcactt | |
| | | | | QDHERWKGVL | | | gtggctc | |
| | | | | GKHGVGKMNN | | | ccagtag | |
| | | | | NGLLLLSKCSEF | | | ctgctag | |
| | | | | ELTITNTVFRMA | | | catgtgg | |
| | | | | NKYKTTWMHP | | | cagcggc | |
| | | | | RSKQWHLIDYII | | | cacaccc | |
| | | | | VRRRDIQDVKIT | | | cgggca | |
| | | | | RAMRGAECWT | | | acggctt | |
| | | | | DHRLVRATLQM | | | cgacag | |
| | | | | RIAPRHPKRAQT | | | gccggct | |
| | | | | VRAFYNVSRLR | | | aaacctt | |
| | | | | DPSYLQTFQSCL | | | gtgaggg | |
| | | | | DNKLSAKGPLT | | | tagccat | |
| | | | | GSSTEKWNQFR | | | cgggtca | |
| | | | | DAVKETSKAVL | | | tcgaccc | |
| | | | | GPKQRNHQDW | | | ctggtga | |
| | | | | FDENNTAIEDLL | | | accagg | |
| | | | | SKKNKAFMEW | | | gctttgc | |
| | | | | QNNPNSAPKKD | | | tcaccca | |
| | | | | RFKSLQATAQR | | | gcatgtg | |
| | | | | EIRKMQDRWW | | | aagactg | |
| | | | | EKKAEEIQRFAD | | | cttcggc | |
| | | | | MKNYKQFFSAL | | | tgaacag | |
| | | | | KTVYGPLKPTT | | | acggaag | |
| | | | | TPLLSSDGDTLI | | | aaaccaa | |
| | | | | KDKKGISNRWK | | | taagaag | |
| | | | | EHFSQLLNRPSS | | | gttcaac | |
| | | | | VDQSALDQIPQ | | | ggctgag | |
| | | | | NRSIEQLDVPPSI | | | agggcg | |
| | | | | EEVQKAIKQMS | | | acgcagc | |
| | | | | AGKAPGKDGIP | | | aaagcac | |
| | | | | TEVYKALNGKA | | | tgtggag | |
| | | | | LQAFHIVLTSIW | | | tgcttag | |
| | | | | EEEDMPPELRD | | | ggcgtgt | |
| | | | | ASIVALYKNKG | | | tggagca | |
| | | | | SRAACDNYRGI | | | caaagga | |
| | | | | SLLSTAGKILAR | | | caacacg | |
| | | | | VILNRLLSSVSE | | | gccatcc | |
| | | | | QNLPESQCGFRP | | | aatgcag | |
| | | | | DRSTIDMVFTV | | | ctgagga | |
| | | | | RQMQEKCLEQN | | | agtctcc | |
| | | | | LSLYIVFIDLTK | | | agatgta | |
| | | | | AFDTVNRDALW | | | acaattt | |
| | | | | VILSKLGCPAKF | | | ttcgtgc | |
| | | | | VKLIQLFHVDM | | | cactgga | |
| | | | | TGEVLSGGETS | | | cccaggc | |
| | | | | DRFNISNGVKQ | | | ttccaac | |
| | | | | GCVLAPVLFNL | | | gccgaga | |
| | | | | FFTQVLRHAVM | | | gagtggg | |
| | | | | DLDLGVYIKYR | | | actgtct | |
| | | | | LDGSLFDLRRLT | | | ctgtgca | |
| | | | | AKTKTTERLILE | | | tcggctt | |
| | | | | ALFADDCALMA | | | ttccact | |
| | | | | HQENHLQTIVD | | | taaatct | |
| | | | | RFSTATKLFGLT | | | ctttca | |
| | | | | ISLSKTEVLFQP | | | cgcacaa | |
| | | | | APGRPTNQPCIT | | | gtatctt | |
| | | | | IDGTQLSNVNTF | | | tgtgcac | |
| | | | | KYLGSTIANDGS | | | actcatc | |
| | | | | LDHEINARIQKA | | | tatccta | |
| | | | | SQALGRLRCKV | | | accccgt | |
| | | | | LQHRGVSTATK | | | ccaccct | |
| | | | | LKVYNAVVLSS | | | cttcaag | |
| | | | | LLYGCETWTLY | | | acctgcg | |
| | | | | RKHMKQLEQFH | | | gcgatgg | |
| | | | | QRSLRSIMRIRW | | | gggagtg | |
| | | | | QDRITNQEVLD | | | gcgacgc | |
| | | | | RANSTSIEVMVL | | | aacaggt | |
| | | | | KTQLRWSGHVI | | | ggaggtg | |
| | | | | RMDPQRIPRQV | | | accactg | |
| | | | | FYGELSAGLRK | | | gcagttg | |
| | | | | QGRPKKRFKDQ | | | tagtcac | |
| | | | | LKSNLKWAGIT | | | gatcc | |
| | | | | PKQLELAASDR | | | tgcacg | |
| | | | | SSWRTHINHAA | | | taggcgg | |
| | | | | TTFEDERRRRLA | | | cccacgg | |
| | | | | AARERRHQATT | | | accagtg | |
| | | | | APPVTTGVPCP | | | gtcgctc | |
| | | | | MCHKLCASAFG | | | ggccctg | |
| | | | | LQSHMRVHRR | | | tgggcag | |
| | | | | | | | caggga | |
| | | | | | | | cgttcgg | |
| | | | | | | | cagcatc | |
| | | | | | | | ctgggcg | |
| | | | | | | | actgagc | |
| | | | | | | | agccctc | |
| | | | | | | | tctag | |
| Vingi- | Anolis | DNAse- | NA | (SEQ ID NO: 404) | | | (SEQ | (SEQ ID |
| 1_Acar | carol- | like, RT | | MDEYQRSLSRP | | | ID NO: | NO: |
| (1) | inensis | | | LLTIMSINIEGLS | | | 704) | 804) |
| | | | | LAKEELLAKMS | | | GGGG | TAGTT |
| | | | | EDISCDILCIQET | | | GACA | GCTTG |
| | | | | HRDITMRRPKIL | | | CGGA | TGATT |
| | | | | GMQLAVERPHR | | | AAGA | TCTTT |
| | | | | QYGSAIFVRSGV | | | GCCT | TCTTT |
| | | | | AISATSLTEVNN | | | CCCC | TTTAT |
| | | | | IEILSVELDSCTV | | | GAAG | TTTAT |
| | | | | SSLYKPPGADFY | | | ATTG | TTCCA |
| | | | | FTPPTSCHNHEA | | | AGTG | TTATT |
| | | | | HFVVGDFNSHS | | | AATT | TGAAA |
| | | | | CVWGYDEDDR | | | CAGT | TGTAT |
| | | | | NGEAVLTWAD | | | CGGG | TTGCT |
| | | | | NSRMSLLHDSK | | | CGTC | GTACC |
| | | | | LPPSFNSGRWK | | | CCCT | AATGC |
| | | | | RGYNPDLIFVKE | | | GGGC | TTTTG |
| | | | | SISHQCTKRVLN | | | AACG | ACACG |
| | | | | PIPNTQHRPICC | | | TTTCT | AAATA |
| | | | | VAYAAVRPKSV | | | TGTA | AATAA |
| | | | | PFRRRYNFNKA | | | AGCG | A |
| | | | | NWTKFTETLEA | | | GCCG | |
| | | | | AISDIEPSIENYD | | | ATCTT | |
| | | | | LFVEAVKRSSRL | | | TCCA | |
| | | | | SIPRGCRTSYLP | | | CCCC | |
| | | | | GLNEESLNQLQ | | | AAAA | |
| | | | | EYLRLFQENPYS | | | GCAT | |
| | | | | DGTIAAGQKLS | | | TGGA | |
| | | | | TALANAKKDR | | | TGA | |
| | | | | WIELLENLDMS | | | | |
| | | | | KSSRKAWQLLR | | | | |
| | | | | RLDSDPLVNPG | | | | |
| | | | | HANVTPDQIAH | | | | |
| | | | | QLIQNGKTNCS | | | | |
| | | | | RIKMKINRVPEL | | | | |
| | | | | ETHQLSSPLNLK | | | | |
| | | | | ELREAIKRCKTG | | | | |
| | | | | KAPGLDDLMM | | | | |
| | | | | EQIKHLGPKAE | | | | |
| | | | | NWLLKFYNQCL | | | | |
| | | | | AHKQIPRAWRK | | | | |
| | | | | TKIIAILKPGKD | | | | |
| | | | | ASNARNYRPISL | | | | |
| | | | | LCHLYKVYERM | | | | |
| | | | | LLNRLGPVIEPK | | | | |
| | | | | LIAQQAGFRPG | | | | |
| | | | | KNCTGQILHLTE | | | | |
| | | | | HIEEGYEKGCIT | | | | |
| | | | | GTVFVDLTAAY | | | | |
| | | | | DTVQHRKMLH | | | | |
| | | | | KVYHITRDFDFT | | | | |
| | | | | KTVQTLLENRSF | | | | |
| | | | | YVEFQGQKSRW | | | | |
| | | | | RRQKNGLPQGS | | | | |
| | | | | VLAPTLFNIFTN | | | | |
| | | | | DQPQPPLTKSFI | | | | |
| | | | | YADDLGLTTQA | | | | |
| | | | | KDFETVEKQLT | | | | |
| | | | | NALKDLSSYYK | | | | |
| | | | | ENHLKPNPAKT | | | | |
| | | | | QVCAFHLRNRE | | | | |
| | | | | ANRKLKVTWE | | | | |
| | | | | GQELEHCFHPK | | | | |
| | | | | YLGVTLDRTLT | | | | |
| | | | | YRKHCMNTKH | | | | |
| | | | | KVAARNNILRK | | | | |
| | | | | LTGSAWGADPQ | | | | |
| | | | | VIRTSALALSFS | | | | |
| | | | | TAEYACPVWHK | | | | |
| | | | | SAHAKQVDIAL | | | | |
| | | | | NETCRIITGCLK | | | | |
| | | | | PTPVDKLYKLA | | | | |
| | | | | GIAPPDVRREVA | | | | |
| | | | | ANGERKKVEHC | | | | |
| | | | | ESHPLHDYHPPP | | | | |
| | | | | TRLKSRKGFMR | | | | |
| | | | | TTTPLDVPPATA | | | | |
| | | | | RVSLWAAKPGN | | | | |
| | | | | SNWMAPQEGLP | | | | |
| | | | | PGANQEWATW | | | | |
| | | | | KSLNRLRSGVG | | | | |
| | | | | RSKDNLARWH | | | | |
| | | | | YLEESSTLCDCG | | | | |
| | | | | AEQTTQHMYAC | | | | |
| | | | | PQCPASCTEEEL | | | | |
| | | | | FKATDNAVAVA | | | | |
| | | | | RFWSKTI | | | | |
| Vingi- | Anolis | DNAse- | NA | (SEQ ID NO: 405) | | | (SEQ | (SEQ ID |
| 1_Acar | carol- | like, RT | | MDEYQRSLSRP | | | ID NO: | NO: |
| (2) | inensis | | | LLTIMSINIEGLS | | | 705) | 805) |
| | | | | LAKEELLAKMS | | | GGGG | TAGTT |
| | | | | EDISCDILCIQET | | | GACA | GCTTG |
| | | | | HRDITMRRPKIL | | | CGGA | TGATT |
| | | | | GMQLAVERPHR | | | AAGA | TCTTT |
| | | | | QYGSAIFVRSGV | | | GCCT | TCTTT |
| | | | | AISATSLTEVNN | | | CCCC | TTTAT |
| | | | | IEILSVELDSCTV | | | GAAG | TTTAT |
| | | | | SSLYKPPGADFY | | | ATTG | TTCCA |
| | | | | FTPPTSCHNHEA | | | AGTG | TTATT |
| | | | | HFVVGDFNSHS | | | AATT | TGAAA |
| | | | | CVWGYDEDDR | | | CAGT | TGTAT |
| | | | | NGEAVLTWAD | | | CGGG | TTGCT |
| | | | | NSRMSLLHDSK | | | CGTC | GTACC |
| | | | | LPPSFNSGRWK | | | CCCT | AATGC |
| | | | | RGYNPDLIFVKE | | | GGGC | TTTTG |
| | | | | SISHQCTKRVLN | | | AACG | ACACG |
| | | | | PIPNTQHRPICC | | | TTTCT | AAATA |
| | | | | VAYAAVRPKSV | | | TGTA | AATAA |
| | | | | PFRRRYNFNKA | | | AGCG | A |
| | | | | NWTKFTETLEA | | | GCCG | |
| | | | | AISDIEPSIENYD | | | ATCTT | |
| | | | | LFVEAVKRSSRL | | | TCCA | |
| | | | | SIPRGCRTSYLP | | | CCCC | |
| | | | | GLNEESLNQLQ | | | AAAA | |
| | | | | EYLRLFQENPYS | | | GCAT | |
| | | | | DGTIAAGQKLS | | | TGGA | |
| | | | | TALANAKKDR | | | TGA | |
| | | | | WIELLENLDMS | | | | |
| | | | | KSSRKAWQLLR | | | | |
| | | | | RLDSDPLVNPG | | | | |
| | | | | HANVTPDQIAH | | | | |
| | | | | QLIQNGKTNCS | | | | |
| | | | | RIKMKINRVPEL | | | | |
| | | | | ETHQLSSPLNLK | | | | |
| | | | | ELREAIKRCKTG | | | | |
| | | | | KAPGLDDLMM | | | | |
| | | | | EQIKHLGAKAE | | | | |
| | | | | NWLLKFYNQCL | | | | |
| | | | | AHKQIPRAWRK | | | | |
| | | | | TKIIAILKPGKD | | | | |
| | | | | ASNARNYRPISL | | | | |
| | | | | LCHLYKVYERM | | | | |
| | | | | LLNRLGPVIEPK | | | | |
| | | | | LIAQQAGFRPG | | | | |
| | | | | KNCTGQILHLTE | | | | |
| | | | | HIEEGYEKGCIT | | | | |
| | | | | GTVFVDLTAAY | | | | |
| | | | | DTVQHRKMLH | | | | |
| | | | | KVYHITRDFDFT | | | | |
| | | | | KTVQTLLENRSF | | | | |
| | | | | YVEFQGQKSRW | | | | |
| | | | | RRQKNGLPQGS | | | | |
| | | | | VLAPTLFNIFTN | | | | |
| | | | | DQPQPPLTKSFI | | | | |
| | | | | YADDLGLTTQA | | | | |
| | | | | KDFETVEKQLT | | | | |
| | | | | NALKDLSSYYK | | | | |
| | | | | ENHLKPNPAKT | | | | |
| | | | | QVCAFHLRNRE | | | | |
| | | | | ANRKLKVTWE | | | | |
| | | | | GQELEHCFHPK | | | | |
| | | | | YLGVTLDRTLT | | | | |
| | | | | YRKHCMNTKH | | | | |
| | | | | KVAARNNILRK | | | | |
| | | | | LTGSAWGADPQ | | | | |
| | | | | VIRTSALALSFS | | | | |
| | | | | TAEYACPVWHK | | | | |
| | | | | SAHAKQVDIAL | | | | |
| | | | | NETCRIITGCLK | | | | |
| | | | | PTPVDKLYKLA | | | | |
| | | | | GIAPPDVRREVA | | | | |
| | | | | ANGERKKVEHC | | | | |
| | | | | ESHPLHGYHPPP | | | | |
| | | | | TRLKSRKGFMR | | | | |
| | | | | TTTPLDVPPAAA | | | | |
| | | | | RVSLWAAKPGN | | | | |
| | | | | SNWMAPQEGLP | | | | |
| | | | | PGANQEWATW | | | | |
| | | | | KSLNRLRSGVG | | | | |
| | | | | RSKDNLARWH | | | | |
| | | | | YLEESSTLCDCG | | | | |
| | | | | AEQTTQHMYAC | | | | |
| | | | | PQCPASCTEEEL | | | | |
| | | | | FKATDNAVAVA | | | | |
| | | | | RFWSKTI | | | | |
| CR1-1_PH | Parhyale | DNAse I- | NA | (SEQ ID NO: 406) | | | (SEQ | (SEQ ID |
| | hawaiensis | like, RT | | MLYTIFLVYGIL | | | ID NO: | NO: |
| | | | | CFFFVYFCIYLYI | | | 706) | 806) |
| | | | | TVYLCFLFFLFL | | | gcgtggc | tagcagc |
| | | | | LLCGDVESNPG | | | ctgcgcg | gttttgg |
| | | | | PGRARGCRLLY | | | ttatcag | gcttccc |
| | | | | CNIRGLHANLA | | | gccgccc | ggtgttg |
| | | | | ELDFVSRGVDV | | | ccattgt | caagatg |
| | | | | VCCSETLVAGR | | | ccggcca | cttcatt |
| | | | | RHDAELALAGF | | | ccggacg | tgggttg |
| | | | | QSPFRRLCGSGP | | | cctcttt | tattacc |
| | | | | GFRGMAVYVRS | | | gtttgta | tgtccgt |
| | | | | GFCAYRQSVHE | | | tgagctg | gggagct |
| | | | | CACHEIIVVRVC | | | gctttgg | caagcgt |
| | | | | GRLNNYYLFSL | | | gtttggg | gaagttt |
| | | | | YRSPATDDSLY | | | gctctgg | taataat |
| | | | | DCLLTAMASIQS | | | gtagccc | aataata |
| | | | | TDPKAAFVFVG | | | ctgagtt | a |
| | | | | DVNAHHRDWL | | | ggaggaa | |
| | | | | GSASPTDCHGV | | | atgccac | |
| | | | | AALDFCTLSSCV | | | tctaaa | |
| | | | | QLVRGSTHIAG | | | ggcggat | |
| | | | | NCLDLVMTDVP | | | gagacct | |
| | | | | DLMTVTVGSPI | | | cttttgg | |
| | | | | GSSDHSHLVVS | | | tccaacg | |
| | | | | LDLNQVVPVVD | | | gcatccc | |
| | | | | TRRVVFVKSRA | | | tgagagg | |
| | | | | NWVAITRAVRT | | | agatgaa | |
| | | | | LPWRQIIHSEDP | | | caggctg | |
| | | | | VSELNDLTVSIL | | | gtgccat | |
| | | | | ERFVPKRTILVR | | | agctggg | |
| | | | | SRDKPWFDDQC | | | tactcag | |
| | | | | RLAFEAKQAAY | | | tcttccg | |
| | | | | RAWRRSRDRTL | | | cagtctg | |
| | | | | WQTYVDRRAE | | | ctcctct | |
| | | | | AKRVYEEAQRR | | | ctctctt | |
| | | | | LRQRSRESLLSI | | | ccatcag | |
| | | | | DHPHRWWSEL | | | gtagtac | |
| | | | | KGSVFGAEPSLP | | | cacctga | |
| | | | | PLVGPGGGIITD | | | tgctctt | |
| | | | | PLARAELLSAHF | | | ttccttt | |
| | | | | DGKQSRDVIAL | | | cctttct | |
| | | | | PHGCHPEPRLTS | | | cttcttc | |
| | | | | LAFRSGAIKVLL | | | ttcttt | |
| | | | | EGLDPYGGVDP | | | tcggcc | |
| | | | | VGMFPLFYKQL | | | aaagcct | |
| | | | | ADVLAPKLAVIF | | | gtactgg | |
| | | | | RRLIRLGNFPRC | | | tgatggc | |
| | | | | WRTGNITPIPKG | | | agggtct | |
| | | | | PVSPYVANYRPI | | | ggggcgc | |
| | | | | TLTPILSKVFEK | | | gtagata | |
| | | | | LIAGKLGRFAEV | | | gctggcc | |
| | | | | TGLLPAGQFAY | | | gctttcg | |
| | | | | RIGLGCCDALLS | | | tagctat | |
| | | | | VSHHLQSALDC | | | cgttact | |
| | | | | RSEARLVQLDFS | | | gtcgatt | |
| | | | | AAFDRVNHRGL | | | tgttttt | |
| | | | | LYKLESFGVGG | | | gctttatt | |
| | | | | RVLSIIRDFVSER | | | | |
| | | | | TQSVSVDGVLS | | | | |
| | | | | ASVGVVSGVPQ | | | | |
| | | | | GSVLGPLLFVLY | | | | |
| | | | | TSDMFSSLENTL | | | | |
| | | | | INYADDSTLMA | | | | |
| | | | | VIPAPRLRDAVA | | | | |
| | | | | QSLNRDLSRISA | | | | |
| | | | | WCSAWSMKLN | | | | |
| | | | | ASKTKSMIISRS | | | | |
| | | | | RTLVPQHPQLEI | | | | |
| | | | | DDTLLQESSSLE | | | | |
| | | | | ILGVVFDEKLTF | | | | |
| | | | | EPHIRRLVSRAS | | | | |
| | | | | TKIGLLRKVNSV | | | | |
| | | | | FGDSQVARRCF | | | | |
| | | | | YAFLLPVLEYCS | | | | |
| | | | | PVWASAADTHL | | | | |
| | | | | RLLDRLVSSASR | | | | |
| | | | | LCADNDLVNLS | | | | |
| | | | | HRRRVAELCMF | | | | |
| | | | | YKVYNNERHW | | | | |
| | | | | LYSSLPALKVFG | | | | |
| | | | | RETRAACGAHS | | | | |
| | | | | FTLEAVRCRTN | | | | |
| | | | | QFCRCFVPWSA | | | | |
| | | | | KVWNLLPASAF | | | | |
| | | | | GRIGLQAFKSA | | | | |
| | | | | VNGFLLDFL | | | | |
| Crack- | Branch- | RT and | NNNNNN | (SEQ ID NO: 407) | | | (SEQ | (SEQ ID |
| 28_BF | iostoma | EN | NNNNNN | MWEKATSNVH | | | ID NO: | NO: |
| | floridae | | NNNNNN | LQSGTWITQNA | | | 707) | 807) |
| | | | NTNNNN | YSVKINPGLSGV | | | AGCC | AACTT |
| | | | NCNNGT | RLIGRSTTCTER | | | CTAG | GATCT |
| | | | NNNNAN | TERTLNLLVCA | | | TCCCT | GGCTG |
| | | | NNNNNN | TLLLAGDVSPNP | | | | ATGCT |
| | | | NNNNNN | GPDTGGLPVWR | | | | CCGTA |
| | | | NCNNNN | KGIVYAFYNVV | | | | GTCTG |
| | | | NNNNNN | SLPRHLDEIQQL | | | | GACTT |
| | | | NNNNNN | LLRNTRIHVLGL | | | | TGATA |
| | | | TNNNNN | NETRLSDSIPDS | | | | TTGGA |
| | | | NNNNNN | SVDINGYTLYRT | | | | TAATT |
| | | | NNNNNN | DRDRQGGGVG | | | | TTATT |
| | | | NNNTNN | VYVKQTIASQR | | | | ATGTA |
| | | | NNNNNN | RCELEQEDLEV | | | | TTGTA |
| | | | NNNNnnt | CCVEIKPEKARK | | | | TATGT |
| | | | nnnnnnnn | TLLTCVYRPPTS | | | | GCTAT |
| | | | nnnnnnnn | GPDWRNSAESL | | | | GTGTA |
| | | | nnnncnnn | VHKLNQTAEKE | | | | CTTTG |
| | | | nnnnnnnn | NADVAIMGDEN | | | | TACTT |
| | | | nnnnnnng | SDLLTSTQAMSS | | | | TTATG |
| | | | cnnnnnnn | VEFLMGLYQLV | | | | TCCAG |
| | | | ntnnnnnn | PVIREPTRITEKT | | | | GATTA |
| | | | nnnnnnnn | ESCIDNIFVSNP | | | | CCTGA |
| | | | nnnnnnnn | DRYKSSASVAW | | | | AAAGC |
| | | | nnntnnnn | GPSDHNLILTCA | | | | AGGCC |
| | | | nnnnnnna | KAGSEAGAAHR | | | | GATTT |
| | | | nnnnnnnn | CEYRSYKLYTQ | | | | CCGGC |
| | | | n | QSFIDSLKSVRW | | | | CTGAG |
| | | | (SEQ ID | DTVFDCTDVSE | | | | ATGTA |
| | | | NO: | AWNAFKDIFLN | | | | ATTAC |
| | | | 15406) | VADEHAPLRTK | | | | TGGTA |
| | | | | TARENNRPAPW | | | | AAATA |
| | | | | MTDTVKNMMG | | | | AATAA |
| | | | | RRDAARRKAIR | | | | AGTGA |
| | | | | TKDVQDWDTY | | | | AGTGA |
| | | | | RSLRNQTTSIIR | | | | A |
| | | | | KEKKSHFATAV | | | | |
| | | | | SEAKGDQSLM | | | | |
| | | | | WKIINSFTGKSK | | | | |
| | | | | STKRVQKLLRA | | | | |
| | | | | DNTSMSDPGEM | | | | |
| | | | | AQEFNDYFTSC | | | | |
| | | | | ASRLTDGMPDS | | | | |
| | | | | EEDPLRHIPDST | | | | |
| | | | | TKFSFDCVEETE | | | | |
| | | | | VLNELQKLKTK | | | | |
| | | | | KATGLDKIPAK | | | | |
| | | | | LLKDSAPVVAK | | | | |
| | | | | PLAHIFNLSLAS | | | | |
| | | | | GEVPSDWKEAQ | | | | |
| | | | | ITPVHKSGSCAD | | | | |
| | | | | VGNYRPVSVLS | | | | |
| | | | | VTSKVMEKLVC | | | | |
| | | | | NQVTRYLTRCK | | | | |
| | | | | LLTTHQSGFRR | | | | |
| | | | | HHSTATAVQKV | | | | |
| | | | | VEDITSGYNCSK | | | | |
| | | | | VTVALFLDLRK | | | | |
| | | | | AFDSVNHEIMLS | | | | |
| | | | | KLKKFGFDSDA | | | | |
| | | | | MKWFTSYLSER | | | | |
| | | | | LQCTCLQGQYS | | | | |
| | | | | SKTRVSCGVPQ | | | | |
| | | | | GSVLGPLLFCLY | | | | |
| | | | | VNDLPNVIQKC | | | | |
| | | | | SIHMYADDTVL | | | | |
| | | | | YYSAVSVKVCE | | | | |
| | | | | ETVSMDMKRV | | | | |
| | | | | VKWLSENRLLL | | | | |
| | | | | HPDKTKSMLFG | | | | |
| | | | | LPQKLKHAGTT | | | | |
| | | | | VNITDGVNVYE | | | | |
| | | | | QVDSFTYLGITL | | | | |
| | | | | DPALRWAAHV | | | | |
| | | | | QKITKKLLSGLG | | | | |
| | | | | AMGRARAFVTN | | | | |
| | | | | EVLKTMYQTLL | | | | |
| | | | | LAHLEYCATAW | | | | |
| | | | | LPSLAQGNKTL | | | | |
| | | | | MLQLDRLVNRA | | | | |
| | | | | ARLITGHKLRD | | | | |
| | | | | HVTVDNLRAEA | | | | |
| | | | | GIDSVRKRTEIT | | | | |
| | | | | TLVTVFKTIRGK | | | | |
| | | | | APAYLASLFKW | | | | |
| | | | | EAPPTMSVRPTR | | | | |
| | | | | SEVKRLRDYDP | | | | |
| | | | | HLLWCPPARVI | | | | |
| | | | | AFRNSLQSYGPF | | | | |
| | | | | LWNSLPLKQRQ | | | | |
| | | | | LLSLRTFKKFIE | | | | |
| | | | | N | | | | |
| L2-5_GA | Gastero- | RT and | NNNNNN | (SEQ ID NO: 408) | | | (SEQ | (SEQ ID |
| | steus | EN, | NNNNNN | MRRLLLLFLIMC | | | ID NO: | NO: |
| | aculeatus | signal | NNNNNN | LTPSPVPVRISSR | | | 708) | 808) |
| | | peptide | NNNNNN | RYYRPRARSAL | | | CAGT | TAAAG |
| | | | NNNNNN | YRNLSSLSYPTR | | | GTGC | ACTAA |
| | | | NNNNNN | STHVQHLVTGG | | | ATCT | CAAAT |
| | | | NNNNNN | LWNCQSATRKA | | | CTTCT | TGTAG |
| | | | NNNNNN | DFISGFAIQQSL | | | ACAA | CACTT |
| | | | NNNNNN | DFLALTETWITP | | | GGCC | AAATT |
| | | | NNNNNN | ENTSTPAALSSA | | | ACCA | GTACT |
| | | | NNNNNN | FSFSHTPRPTGR | | | GACA | TGTAA |
| | | | NNNNNN | GGGTGLLISPK | | | TCCA | CGTCA |
| | | | NNNNNN | WSFSLYPLPPST | | | GGCG | CTCAT |
| | | | NNNNNN | PLSFEFHAVTIT | | | ACCT | CTATA |
| | | | NNNNNN | HPVQLTIIVLYR | | | GAAA | GCAAA |
| | | | NNNNNN | PPGSLGHFLEEL | | | TCGG | TTGTA |
| | | | NNNNnn | DILLSNFPENGP | | | ACTA | AATTG |
| | | | nnnnnnnn | PLILLGDFNIQTE | | | AGTA | GCTTA |
| | | | nnnnnnnn | KSSDLLHLLSSF | | | TCTCT | TTTGA |
| | | | nnnnnnnn | ALSLSPSPPTHK | | | TTCTT | GGAA |
| | | | nnnnnnnn | AGNHLDYIFTR | | | TAAA | ATTGC |
| | | | nnnnnnnn | NCSTTNLSVTPL | | | CCAA | ACTTT |
| | | | nnnnnnnn | HVSDHFFISYSL | | | GCTA | CTTGT |
| | | | nnnnnnnn | PLSITNKPPSLTN | | | GTCT | TTCTT |
| | | | nnnnnnnn | SIPARRNIRSLSP | | | GCTA | GTTCT |
| | | | nnnnnnnn | SSLASSVLSALP | | | AATT | CCTGA |
| | | | nnnnnnnn | STDSFSLLHPNA | | | TGCT | GTTTG |
| | | | nnnnnnnn | AAETLLSTLSSS | | | GTTG | TACCC |
| | | | nnnnnnnn | LDSLCPLTTRRT | | | ATTCT | TATGG |
| | | | nn | GKSPPAPWLSQ | | | AGTG | TTGAA |
| | | | | PVRAMRATMR | | | TCTTA | TGCAC |
| | | | | ASERRWRKYKR | | | AGTT | TTATT |
| | | | | PDDLLEFQSLLS | | | AATT | GTACG |
| | | | | SFSASISAAKSSF | | | TGAT | TCGCT |
| | | | | YQSKIESSFSNP | | | TGCT | TTGGA |
| | | | | KKLFSIFSNLLEP | | | GATT | TAAAA |
| | | | | PTPPPPSTLLPG | | | TGCTT | GCGTC |
| | | | | DFVNYFTKKIA | | | TAGT | AGCTA |
| | | | | DIRSSFSNPPPTS | | | TTTTG | AATGA |
| | | | | RVPPTSPLSPSLS | | | TCGT | CATGT |
| | | | | SFTALSPNQILT | | | CTCA | AATGT |
| | | | | LVTSARPTTCPL | | | CGGC | AATGT |
| | | | | DPIPSHLLQSIAP | | | CAGT | AATGT |
| | | | | DLLPFLTCLINN | | | TCTCT | AATG |
| | | | | ALSSGCFPNSLK | | | TTGTT | |
| | | | | EARVNPLLKKP | | | TGAA | |
| | | | | TLNPSEENNYRP | | | GTTA | |
| | | | | VSLLPFLSKTLE | | | TCTTG | |
| | | | | RAIFNQLSSYLH | | | GTTG | |
| | | | | CNNLLDPHQSG | | | CTAG | |
| | | | | FKAGHSTETAL | | | TTTGC | |
| | | | | LAVSEQLHTAR | | | TCAA | |
| | | | | AASLSSVLILLD | | | GCTC | |
| | | | | LSAAFDTVNHQI | | | TTTCA | |
| | | | | LISSLQELGVTG | | | GTCTT | |
| | | | | SALSLLSSYLDG | | | TTAG | |
| | | | | RTYRVTWRGSV | | | TGCC | |
| | | | | SEPCPLTTGVPQ | | | AGTT | |
| | | | | GSVLGPLLFSLY | | | TGTG | |
| | | | | TNSLGAVIRSHG | | | TTCTA | |
| | | | | FSYHSYADDTQ | | | GATT | |
| | | | | LILSFPHSDTQV | | | CTAC | |
| | | | | AARISACLTDIS | | | TATT | |
| | | | | QWMSAHHLKIN | | | AAGT | |
| | | | | PDKTELLLFPGK | | | TAAC | |
| | | | | DSLTQDLTVNF | | | TGCC | |
| | | | | GNSVLTPTSTAK | | | AGTG | |
| | | | | NLGVTLDSQLS | | | TGCC | |
| | | | | LTPNITATTRSC | | | CTCCT | |
| | | | | RYTLYNIRRIRP | | | AACT | |
| | | | | LLTQKAAQVLI | | | CTGC | |
| | | | | QALVISRLDYC | | | TAGG | |
| | | | | NSLLAGLPATAI | | | TTTTG | |
| | | | | RPLQLIQNAAA | | | ACCT | |
| | | | | RLVFNLPKFSHT | | | GATC | |
| | | | | TPLLRSLHWLP | | | TAAG | |
| | | | | VAARIQFKTLVL | | | TCTGT | |
| | | | | TYHAVNGSGPA | | | TTTGC | |
| | | | | YIQDMVKPYIPT | | | CTTGT | |
| | | | | RTLRSASAKLL | | | TTTCT | |
| | | | | VPPSLRAKHSTR | | | GAAG | |
| | | | | SRLFAVLAPKW | | | CAAA | |
| | | | | WNELSEDTRTA | | | TAAG | |
| | | | | ESLHIFRRKLKT | | | ACTT | |
| | | | | HLFRLYLD | | | GTAT | |
| | | | | | | | CCTT | |
| | | | | | | | AAAC | |
| | | | | | | | TCTC | |
| | | | | | | | ATTTT | |
| | | | | | | | GTCA | |
| | | | | | | | AAAC | |
| | | | | | | | ACCA | |
| | | | | | | | CATG | |
| | | | | | | | GTGT | |
| | | | | | | | TTGTT | |
| | | | | | | | CACT | |
| | | | | | | | GATT | |
| | | | | | | | AGGG | |
| | | | | | | | TGTC | |
| | | | | | | | AAGC | |
| | | | | | | | TATT | |
| | | | | | | | GGTG | |
| | | | | | | | CTTTG | |
| | | | | | | | CATTT | |
| | | | | | | | TGAG | |
| | | | | | | | GAGT | |
| | | | | | | | TTCTG | |
| | | | | | | | TCGA | |
| | | | | | | | GGCC | |
| | | | | | | | AATC | |
| | | | | | | | GACC | |
| | | | | | | | TTTTG | |
| | | | | | | | TCTCC | |
| | | | | | | | TAAA | |
| | | | | | | | CGAC | |
| | | | | | | | GGGG | |
| | | | | | | | GAGC | |
| | | | | | | | GGCC | |
| | | | | | | | AGCG | |
| | | | | | | | CAGC | |
| | | | | | | | CGCA | |
| | | | | | | | GCCG | |
| | | | | | | | ACTT | |
| | | | | | | | CCAC | |
| | | | | | | | TAAC | |
| | | | | | | | GAGG | |
| | | | | | | | GAGT | |
| | | | | | | | ATTT | |
| | | | | | | | AACT | |
| | | | | | | | AGAA | |
| | | | | | | | ATCG | |
| | | | | | | | TGGG | |
| | | | | | | | AAGC | |
| | | | | | | | GTTA | |
| | | | | | | | GCTT | |
| | | | | | | | ATCC | |
| | | | | | | | TCGC | |
| | | | | | | | AGCA | |
| | | | | | | | CGAA | |
| | | | | | | | GACG | |
| | | | | | | | AGCA | |
| | | | | | | | GAAC | |
| | | | | | | | AAAG | |
| | | | | | | | ACCA | |
| | | | | | | | GGGA | |
| | | | | | | | GTCTT | |
| | | | | | | | TCGT | |
| | | | | | | | GGAG | |
| | | | | | | | TCAA | |
| | | | | | | | GACG | |
| | | | | | | | AGAG | |
| | | | | | | | ACAA | |
| | | | | | | | AGAC | |
| | | | | | | | CAGG | |
| | | | | | | | GAGT | |
| | | | | | | | CTTTC | |
| | | | | | | | GTGG | |
| | | | | | | | AGTC | |
| | | | | | | | AAGA | |
| | | | | | | | CGAG | |
| | | | | | | | CAGA | |
| | | | | | | | ACAA | |
| | | | | | | | AGAC | |
| | | | | | | | AAGG | |
| | | | | | | | GAGT | |
| | | | | | | | CTTTC | |
| | | | | | | | GTGG | |
| | | | | | | | CAGT | |
| | | | | | | | CTTC | |
| | | | | | | | GGGG | |
| | | | | | | | CGGC | |
| | | | | | | | TGA | |
| RTE-3_BF | Branch- | RT and | NTNNNN | (SEQ ID NO: 409) | — | | (SEQ | (SEQ ID |
| | iostoma | EN | NNNNNN | MSGTPRVAFDS | | | ID NO: | NO: |
| | floridae | | NTNNNN | GKDLRNPIGQSP | | | 709) | 809) |
| | | | NNNNNN | PALSRAAPGQL | | | TCTGT | TGACC |
| | | | NNNNNN | GTDPSRSACFIG | | | AAAT | TGATA |
| | | | NNNNNG | CLELRVLLDKW | | | GGCT | CAGAG |
| | | | NNNNNN | IVCRAPDKQESK | | | GTGT | CGCTA |
| | | | NNNNNN | EKRRQKTQPIRI | | | GATG | CCATC |
| | | | NNNNNN | GSWNVRTMRT | | | CGTC | ATCTG |
| | | | NNNNNN | GLSDDLTVIEDI | | | TAGT | GAAA |
| | | | NNNNNN | RKTAAIDRELY | | | GTGT | GATGG |
| | | | NNNNNN | RLNIDIVALQET | | | AGGC | AAGG |
| | | | TNNNTN | RLPDSGSLKEDS | | | GTAG | ATGCC |
| | | | NNNNNN | YTFFWQGKGM | | | CGGT | TACTA |
| | | | NNNNNA | EETREHGVGFA | | | AGTG | C |
| | | | NNNNNN | VRNTLLHMIEPP | | | TGCTT | |
| | | | NNNNnn | TGGTERIITLRLS | | | GCCA | |
| | | | nnnnnnnn | THEGPVNLLCV | | | CTTCT | |
| | | | nntnnnnn | YAPTLQATSEV | | | CGCT | |
| | | | nnnnnnnn | KDQFYGQLDSA | | | TTCA | |
| | | | ngngnnnn | IKKIPVSEHIFIL | | | GCCC | |
| | | | nntnnnnn | GDFNARVGTDQ | | | TCAC | |
| | | | cnnnnnnn | ESWQTVLGHHG | | | CGCT | |
| | | | ntnnnnnn | IGKMNENGQRL | | | GGCT | |
| | | | nnnnnnnn | LELCCYHNLCV | | | AGCG | |
| | | | tnnnnnnn | TNTFFQNKAIHK | | | GAGC | |
| | | | nnnnnnan | ASWRHPRSQRW | | | TGCA | |
| | | | nnnnnnnn | HQLDLVITRRTS | | | TGCA | |
| | | | nnnnnnnn | LNSVCNTRAYH | | | GCAC | |
| | | | nn | SADCDTDHSLIA | | | TGCG | |
| | | | (SEQ ID | ARIKLRPKKLH | | | AAAA | |
| | | | NO: | HMKKKGQPKID | | | GAGA | |
| | | | 15407) | VSKTMLPDRNQ | | | GCCG | |
| | | | | KFLECLEGTLN | | | AGTG | |
| | | | | NIQPQDAEHRW | | | CGTA | |
| | | | | ETLSKTIYSAAA | | | AGTC | |
| | | | | QSYGKKERKNT | | | TCTCC | |
| | | | | DWFEAYISELEP | | | TGCC | |
| | | | | VMDTKRKALVS | | | AGTA | |
| | | | | YKQNPSSQNLQ | | | CATA | |
| | | | | ALKAARQEAQR | | | GCCT | |
| | | | | ASRRCANNYWL | | | CTCC | |
| | | | | LLSERIQLASAT | | | ACAG | |
| | | | | GDIRRMYEGIK | | | CAAG | |
| | | | | QATGKPIKKSAP | | | TCCC | |
| | | | | LKAKSGEIITDK | | | CATT | |
| | | | | DKQMARWVEH | | | GCAG | |
| | | | | YLDIYSTENSVS | | | TGCC | |
| | | | | QDALDNIEDFSV | | | TCCTC | |
| | | | | LAELDADPTIEE | | | GTGG | |
| | | | | LSKAIDSMSNG | | | CTAC | |
| | | | | KAPGEDNIPAEII | | | AGAC | |
| | | | | KSGKSVLLEPLH | | | GGAA | |
| | | | | ELLRLCWKEGK | | | ACTG | |
| | | | | VPQSMRNSKIV | | | GGCA | |
| | | | | TLYKNKGDRTD | | | CCGT | |
| | | | | CNSYRGISLLSI | | | AAGG | |
| | | | | VGKVFAKVVLT | | | CCCC | |
| | | | | RLQVLADRVYP | | | AGGC | |
| | | | | ESQCGFRAERST | | | TAAA | |
| | | | | TDMIFSVRQLQE | | | CTGC | |
| | | | | KCREQQRPLYIA | | | AGGG | |
| | | | | FIDLTKAFDLVS | | | AGCT | |
| | | | | RRGLFQLLRKIG | | | CGGA | |
| | | | | CPPQLLDIIISFH | | | GGAG | |
| | | | | EDMKGVVSFDG | | | GTCT | |
| | | | | ETSEPFAIRSGV | | | GGCC | |
| | | | | KQGCVLAPTLF | | | CCCA | |
| | | | | GIFFSLLLKSAF | | | GACG | |
| | | | | GHSTQGVHLHT | | | CACG | |
| | | | | RSDGKLFNLAR | | | GCAT | |
| | | | | LRAKTKVRSVLI | | | GCAT | |
| | | | | RDMLFADDAAL | | | GGCC | |
| | | | | VAHVEDELQQL | | | CACC | |
| | | | | LNQFAHACSEF | | | GGCG | |
| | | | | ALTISIKKTVVM | | | TGTG | |
| | | | | GQDVPQPPVVTI | | | GACA | |
| | | | | GSEVLEVTDHF | | | CGCC | |
| | | | | TYLGSTVTSNLS | | | CTGA | |
| | | | | LDKEIDRRIARA | | | TGCC | |
| | | | | AGVMTKLGTRV | | | TGCG | |
| | | | | WNNSHLTLNTK | | | AACC | |
| | | | | LEVYRSCVLSTL | | | AGAC | |
| | | | | LYGSETWTTYA | | | CCCC | |
| | | | | KQENRLESFHL | | | AGCT | |
| | | | | RCLRRILGISWR | | | ATGG | |
| | | | | DRVPNTTVLER | | | GCAA | |
| | | | | SCSLSIHLLLCQ | | | ATAG | |
| | | | | RRLRWLGHVSR | | | CACG | |
| | | | | MKDGRIPKDILF | | | GGTA | |
| | | | | GELATGKRPVG | | | GACG | |
| | | | | RPALRFRDVCK | | | GAGC | |
| | | | | RDLKLTDIDPAS | | | TCGT | |
| | | | | WEQIAADRNR | | | CAGC | |
| | | | | WRHTVKDGLA | | | CTTG | |
| | | | | KGQERRTEHLE | | | GATG | |
| | | | | SRRRKRKEKPQ | | | GCAG | |
| | | | | QGNPSAFICPNC | | | TTCGT | |
| | | | | GRDCHARIGLQ | | | CTAG | |
| | | | | SHSRRCQPP | | | GGGA | |
| | | | | | | | AGGA | |
| | | | | | | | AAAC | |
| | | | | | | | CCTG | |
| | | | | | | | ATTC | |
| | | | | | | | AAAA | |
| | | | | | | | ACCT | |
| | | | | | | | CCGC | |
| | | | | | | | TGCC | |
| | | | | | | | TTGC | |
| | | | | | | | GGCT | |
| | | | | | | | ATAC | |
| | | | | | | | CCAG | |
| | | | | | | | TCCT | |
| | | | | | | | GGGA | |
| | | | | | | | AAGG | |
| | | | | | | | CTAC | |
| | | | | | | | GGGA | |
| | | | | | | | GTTA | |
| | | | | | | | ACCC | |
| | | | | | | | AGAG | |
| | | | | | | | AGAA | |
| | | | | | | | AATC | |
| | | | | | | | CGGA | |
| | | | | | | | GTGG | |
| | | | | | | | AGTA | |
| | | | | | | | CGTG | |
| | | | | | | | AGGC | |
| | | | | | | | GGTT | |
| | | | | | | | GGCT | |
| | | | | | | | GTCA | |
| | | | | | | | AACT | |
| | | | | | | | CTGT | |
| | | | | | | | CATC | |
| | | | | | | | CTTCC | |
| | | | | | | | GGCA | |
| | | | | | | | ACTC | |
| | | | | | | | CTGC | |
| | | | | | | | AGCC | |
| | | | | | | | AAAC | |
| | | | | | | | CAAC | |
| | | | | | | | GCCA | |
| | | | | | | | AGTG | |
| | | | | | | | TCAC | |
| | | | | | | | GCCT | |
| | | | | | | | CGCG | |
| | | | | | | | TTCCC | |
| | | | | | | | TTGG | |
| | | | | | | | ACCA | |
| | | | | | | | CGTC | |
| | | | | | | | GGTG | |
| | | | | | | | AGGT | |
| | | | | | | | CGAG | |
| | | | | | | | AGGG | |
| | | | | | | | GGGT | |
| | | | | | | | CCTG | |
| | | | | | | | TTGT | |
| | | | | | | | GTTTT | |
| | | | | | | | TGGG | |
| | | | | | | | CAGC | |
| | | | | | | | GCAG | |
| | | | | | | | GTCC | |
| | | | | | | | TCCA | |
| | | | | | | | TAAA | |
| | | | | | | | CCTG | |
| | | | | | | | CCCA | |
| | | | | | | | GGCT | |
| | | | | | | | AGCG | |
| | | | | | | | CTCT | |
| | | | | | | | GGAG | |
| | | | | | | | AGGC | |
| | | | | | | | CACT | |
| | | | | | | | CCAG | |
| | | | | | | | TCGC | |
| | | | | | | | CCCC | |
| | | | | | | | ATCA | |
| | | | | | | | CTGG | |
| | | | | | | | GGGT | |
| | | | | | | | GAGA | |
| | | | | | | | AACA | |
| | | | | | | | AACC | |
| | | | | | | | GGGA | |
| | | | | | | | GACA | |
| | | | | | | | GCAG | |
| | | | | | | | TTTAC | |
| | | | | | | | GGGT | |
| | | | | | | | TATA | |
| | | | | | | | AGTC | |
| | | | | | | | CTTG | |
| | | | | | | | CTAA | |
| | | | | | | | ATTG | |
| | | | | | | | ACGT | |
| | | | | | | | AA | |
| RTE-25_ | Locusta | RT and | NNNNNN | (SEQ ID NO: 410) | | | (SEQ | (SEQ ID |
| LMi | migratoria | EN | NNNNNN | MPRKNWNCGR | | | ID NO: | NO: |
| | | | NNNNNN | RTGDEKRKMM | | | 710) | 810) |
| | | | NNNNAN | FGCWNVQGIST | | | CCCG | TAGTG |
| | | | NNNNNN | KIDLLPAELDMF | | | TGTG | TAAAA |
| | | | NNNNNN | NIDVVVLSETKR | | | GAGT | CCTTA |
| | | | NNNANN | KGKGEEELDNY | | | TTGCT | TGTAC |
| | | | NNNCNN | VHIWSGVSKAV | | | GGTC | TAGGT |
| | | | NANNNN | RAKAGVSIMIQ | | | TTCC | GTATT |
| | | | NNNNNN | KKWKKRITNWT | | | ATCG | CATTT |
| | | | NNNNNN | FINERIITVEMTL | | | GGCA | CTGGG |
| | | | NNNNNN | FAREVVIIGVYA | | | CCTC | CGTAT |
| | | | NNNNNN | PTNDTKDKEKD | | | CCCA | TAGTA |
| | | | NNNNNN | AFWDTLRETIEK | | | GGTG | TGTTG |
| | | | NNNNNN | IPRRKELIIMGD | | | GCGG | GAGGT |
| | | | NNNNNN | MNGRVGIRESC | | | ATAG | AAACC |
| | | | CNNNnnn | KIVGKHGEAEY | | | GGGA | TCTGT |
| | | | nnnnnnnn | NDNGERLIDICA | | | ATGC | AATGA |
| | | | annnnnnn | QFDLKITNTFFK | | | TCAC | GGACA |
| | | | nnnnnnan | HKDIHKYTWQQ | | | CAGA | ATCTC |
| | | | tnntnnnn | NTKELRSIIDYIII | | | TATG | AATAA |
| | | | nnnnnnnn | RQTSSFKAADV | | | GTGG | TAAAA |
| | | | nnnnannn | RSYRGAQCGSD | | | GTAC | TAAAA |
| | | | nnnnnnnn | HYLVKMKSFWP | | | CGGG | TAAA |
| | | | nngnnnnn | WKNATNDTSNI | | | GAAA | |
| | | | nannnnnt | NKMNCSEKVQ | | | TAAA | |
| | | | nnnnnnan | NVHFNIDSLQDE | | | ATAC | |
| | | | nnnnnnnn | SIRTFFKARMER | | | CCGG | |
| | | | nnannnnn | TLDESFEGSTEEI | | | GGTG | |
| | | | n | YEYIKTKVKNV | | | GACC | |
| | | | (SEQ ID | ASEVLGIKENNP | | | AAAA | |
| | | | NO: | KRAAEWWSEEI | | | CCAG | |
| | | | 15408) | ETSVKEKRNAF | | | CAAC | |
| | | | | VQWLNDKSEGT | | | TGCT | |
| | | | | RSKYKEKKNEV | | | GCCT | |
| | | | | EKKIRLAKNEA | | | TGTA | |
| | | | | WERTCANVNSK | | | GTAT | |
| | | | | LGFGRAKEAWS | | | GATA | |
| | | | | VLKALRQDTKG | | | TTGG | |
| | | | | KSNLQLVTQKE | | | CTTAT | |
| | | | | WEEYFKKLLNE | | | CAAA | |
| | | | | DRDEYLEEGTV | | | GGCT | |
| | | | | EENEHHDDEILI | | | AAAG | |
| | | | | SESEVLQVLRTG | | | GAAG | |
| | | | | KNGKSPGPGNI | | | AAAA | |
| | | | | NMEFLKYGGDK | | | CCTT | |
| | | | | IVKLILQLFNKM | | | GAAT | |
| | | | | LHGDSVPKEMK | | | ACAA | |
| | | | | LGYISTIFKKGD | | | ATTA | |
| | | | | RKICSNYRGICV | | | CCTG | |
| | | | | TNTLMRIFGKII | | | GTCC | |
| | | | | KNKLEKNFRTQ | | | TCCA | |
| | | | | QEQCGFTAGRS | | | GGTT | |
| | | | | CVDHIFTLRQIL | | | GGGG | |
| | | | | EKHREKSKNVG | | | GTTG | |
| | | | | LIFIDLEKAYDT | | | TGCA | |
| | | | | VPRKLLWRALH | | | GTGG | |
| | | | | RANINTSLIKIIE | | | GCCA | |
| | | | | QMYKDNICQVK | | | GCTC | |
| | | | | IGNTLSQKFRTS | | | CTCA | |
| | | | | KGLLQGCPMSP | | | CTCA | |
| | | | | TLFKIYIDICLRT | | | CATA | |
| | | | | WSQKCNSMGLE | | | AAAA | |
| | | | | IRDGVYLHHLLF | | | TATA | |
| | | | | ADDQVVIAQDG | | | AAAT | |
| | | | | EDANYMCNQL | | | GCTA | |
| | | | | AIAYKNWGLKI | | | AAAA | |
| | | | | NYQKTEYLTND | | | ACCT | |
| | | | | PHELRIEGKKIK | | | AATA | |
| | | | | KVNTFCYLGSIL | | | AT | |
| | | | | ETEGKSDSEINK | | | | |
| | | | | RISSGRKVIGML | | | | |
| | | | | NSVLWSRNVM | | | | |
| | | | | NRTKKIIYKSIFE | | | | |
| | | | | SAVLYGAETWT | | | | |
| | | | | INQKHTKKLQA | | | | |
| | | | | LEMDFWRRSAR | | | | |
| | | | | ISRKEKRRNTEV | | | | |
| | | | | IKRMEIIERIDEV | | | | |
| | | | | MDRKKLRWYG | | | | |
| | | | | HVRRMEDTRIP | | | | |
| | | | | KLVLEWQPEGR | | | | |
| | | | | RRRGRPVTTWI | | | | |
| | | | | KNVQLTMNRLG | | | | |
| | | | | AEEEDTQDRHT | | | | |
| | | | | WRNIVNN | | | | |

### Retrotransposon Discovery Tools

[0323] As the result of repeated mobilization over time, transposable elements in genomic DNA often exist as tandem or interspersed repeats (Jurka Curr Opin Struct Biol 8, 333-337 (1998)). Tools capable of recognizing such repeats can be used to identify new elements from genomic DNA and for populating databases, e.g., Repbase (Jurka et al Cytogenet Genome Res 110, 462-467 (2005)). One such tool for identifying repeats that may comprise transposable elements is RepeatFinder (Volfovsky et al Genome Biol 2 (2001)), which analyzes the repetitive structure of genomic sequences. Repeats can further be collected and analyzed using additional tools, e.g., Censor (Kohany et al BMC Bioinformatics 7, 474 (2006)). The Censor package takes genomic repeats and annotates them using various BLAST approaches against known transposable elements. An all-frames translation can be used to generate the ORF(s) for comparison.

[0324] Other exemplary methods for identification of transposable elements include RepeatModeler2, which automates the discovery and annotation of transposable elements in genome sequences (Flynn et al bioRxiv (2019)). In addition to accomplishing this via available packages like Censor, one can perform an all-frames translation of a given genome or sequence and annotate with a protein domain tool like InterProScan, which tags the domains of a given amino acid sequence using the InterPro database (Mitchell et al. Nucleic Acids Res 47, D351-360 (2019)), allowing the identification of potential proteins comprising domains associated with known transposable elements.

[0325] Retrotransposons can be further classified according to the reverse transcriptase domain using a tool such as RTclass1 (Kapitonov et al Gene 448, 207-213 (2009)).

### Polypeptide Component of Gene Modifying System

### RT Domain

[0326] In certain aspects of the present invention, the reverse transcriptase domain of the gene modifying system is based on a reverse transcriptase domain of an APE-type or RLE-type non-LTR retrotransposon, or of a PLE-type retrotransposon. A wild-type reverse transcriptase domain of an APE-type, RLE-type, or PLE-type retrotransposon can be used in a gene modifying system or can be modified (e.g., by insertion, deletion, or substitution of one or more residues) to alter the reverse transcriptase activity for target DNA sequences. In some embodiments, the reverse transcriptase is altered from its natural sequence to have altered codon usage, e.g. improved for human cells. In some embodiments, the reverse transcriptase domain is a heterologous reverse transcriptase from a different LTR-retrotransposon, non-LTR retrotransposon, or other source. In certain embodiments, a gene modifying system includes a polypeptide that comprises a reverse transcriptase domain of a RTE (e.g., RTE-1_MD, RTE-3_BF, and RTE-25_LMi), CR1 (e.g., CR1-1_PH), Crack (e.g., Crack-28_RF), L2 (e.g., L2-2_Dre and L2-5_GA), and Vingi (e.g., Vingi-1_Acar) retrotransposon.

[0327] In certain embodiments, a gene modifying system includes a polypeptide that comprises a reverse transcriptase domain of a retrotransposon listed in Table 10, Table 11, Table X, Table Z1, Table Z2, or Table 3A or 3B of PCT Pub. No.: WO/2021/178717, which are incorporated herein by reference as they relate to domains from retrotransposons.

[0328] In certain embodiments, a gene modifying system includes a polypeptide that comprises a reverse transcriptase domain of a retrotransposon listed in Table R1. In some embodiments, the amino acid sequence of the reverse transcriptase domain of a gene modifying system is at least about 50%, at least about 60%, at least about 70%, at least about 80%, at least about 85%, at least about 90%, at least about 95%, at least about 96%, at least about 97%, at least about 98%, at least about 99% identical to the amino acid sequence of a reverse transcriptase domain of a retrotransposon whose DNA sequence is referenced in Table R1. Reverse transcriptase domains can be identified, for example, based upon homology to other known reverse transcription domains using routine tools as Basic Local Alignment Search Tool (BLAST). In some embodiments, reverse transcriptase domains are modified, for example by site-specific mutation. In some embodiments, the reverse transcriptase domain is engineered to bind a heterologous template RNA.

[0329] In some embodiments, a polypeptide (e.g., RT domain) comprises an RNA-binding domain, e.g., that specifically binds to an RNA sequence. In some embodiments, a template RNA comprises an RNA sequence that is specifically bound by the RNA-binding domain.

[0330] In some embodiments, the RT domain forms a dimer (e.g., a heterodimer or homodimer). In some embodiments, the RT domain is monomeric. In some embodiments, an RT domain naturally functions as a monomer or as a dimer (e.g., heterodimer or homodimer). In some embodiments, an RT domain naturally functions as a monomer. Naturally heterodimeric RT domains may, in some embodiments, also be functional as homodimers. In some embodiments, dimeric RT domains are expressed as fusion proteins, e.g., as homodimeric fusion proteins or heterodimeric fusion proteins. In some embodiments, the RT function of the system is fulfilled by multiple RT domains (e.g., as described herein). In further embodiments, the multiple RT domains are fused or separate, e.g., may be on the same polypeptide or on different polypeptides.

[0331] In some embodiment, a gene modifying polypeptide described herein comprises an RNase H domain, e.g., wherein the RNase H domain may be part of the RT domain. In some embodiments, an RT domain (e.g., as described herein) comprises an RNase H domain, e.g., an endogenous RNAse H domain or a heterologous RNase H domain. In some embodiments, an RT domain (e.g., as described herein) lacks an RNase H domain. In some embodiments, an RT domain (e.g., as described herein) comprises an RNase H domain that has been added, deleted, mutated, or swapped for a heterologous RNase H domain. In some embodiments, mutation of an RNase H domain yields a polypeptide exhibiting lower RNase activity, e.g., as determined by the methods described in Kotewicz et al. Nucleic Acids Res 16(1):265-277 (1988) (incorporated herein by reference in its entirety), e.g., lower by at least 10%, 20%, 30%, 40%, 50%, 60%, 70%, 80%, or 90% compared to an otherwise similar domain without the mutation. In some embodiments, RNase H activity is abolished.

[0332] In some embodiments, an RT domain is mutated to increase fidelity compared to an otherwise similar domain without the mutation. For instance, in some embodiments, a YADD (SEQ ID NO: 15409) or YMDD motif (SEQ ID NO: 15410) in an RT domain (e.g., in a reverse transcriptase) is replaced with YVDD (SEQ ID NO: 15411). In embodiments, replacement of the YADD (SEQ ID NO: 15409) or YMDD (SEQ ID NO: 15410) or YVDD (SEQ ID NO: 15411) results in higher fidelity in retroviral reverse transcriptase activity (e.g., as described in Jamburuthugoda and Eickbush J Mol Biol 2011; incorporated herein by reference in its entirety).

### Endonuclease Domain:

[0333] In some embodiments, the polypeptide comprises an endonuclease domain (e.g., a heterologous endonuclease domain). In certain embodiments, the endonuclease/DNA binding domain of an APE-type retrotransposon, the endonuclease domain of an RLE-type retrotransposon, or the endonuclease domain of a PLE-type retrotransposon can be used or can be modified (e.g., by insertion, deletion, or substitution of one or more residues) in a gene modifying system described herein. In some embodiments, the endonuclease domain or endonuclease/DNA binding domain is altered from its natural sequence to have altered codon usage, e.g. improved for human cells. In some embodiments, the endonuclease element is a heterologous endonuclease element. The amino acid sequence of an endonuclease domain of a gene modifying system described herein may be at least about 50%, at least about 60%, at least about 70%, at least about 80%, at least about 85%, at least about 90%, at least about 95%, at least about 96%, at least about 97%, at least about 98%, at least about 99% identical to the amino acid sequence of an endonuclease domain of a retrotransposon whose DNA sequence is referenced in Table X, Z1, Z2, 3A, or 3B of PCT Pub. No: WO/2021/178717, which are incorporated herein by reference as they relate to domains from retrotransposons.

[0334] In certain embodiments, a gene modifying system includes a polypeptide that comprises an endonuclease domain of a retrotransposon listed in Table R1. In some embodiments, the amino acid sequence of the endonuclease domain of a gene modifying system is at least about 50%, at least about 60%, at least about 70%, at least about 80%, at least about 85%, at least about 90%, at least about 95%, at least about 96%, at least about 97%, at least about 98%, at least about 99% identical to the amino acid sequence of a endonuclease domain of a retrotransposon whose DNA sequence is referenced in Table R1. Endonuclease domains can be identified, for example, based upon homology to other known endonuclease domains using tools as Basic Local Alignment Search Tool (BLAST).

[0335] In some embodiments, a gene modifying polypeptide possesses the function of DNA target site cleavage via an endonuclease domain. In some embodiments, the endonuclease domain is also a DNA-binding domain. In some embodiments, the endonuclease domain is also a template nucleic acid (e.g., template RNA) binding domain. In certain embodiments, the endonuclease/DNA binding domain of an APE-type retrotransposon or the endonuclease domain of an RLE-type retrotransposon can be used or can be modified (e.g., by insertion, deletion, or substitution of one or more residues) in a gene modifying system described herein.

### Template Nucleic Acid Binding Domain:

[0336] A gene modifying polypeptide typically contains regions capable of associating with the template nucleic acid (e.g., template RNA). In some embodiments, the template nucleic acid binding domain is an RNA binding domain. In some embodiments, the RNA binding domain is a modular domain that can associate with RNA molecules containing specific signatures, e.g., structural motifs, e.g., secondary structures present in the 3′ UTR in non-LTR retrotransposons. In other embodiments, the template nucleic acid binding domain (e.g., RNA binding domain) RNA binding domain is contained within the reverse transcription domain, e.g., the reverse transcriptase-derived component has a known signature for RNA preference, e.g., secondary structures present in the 3′ UTR in non-LTR retrotransposons.

### DNA Binding Domain:

[0337] In certain aspects, the DNA-binding domain of a gene modifying polypeptide described herein is selected, designed, or constructed for binding to a desired host DNA target sequence. In certain embodiments, the DNA-binding domain of the engineered retrotransposon is a heterologous DNA-binding protein or domain relative to a native retrotransposon sequence. In certain embodiments, the heterologous DNA-binding domain is a DNA binding domain of a retrotransposon described in Table R1 herein or in Table X, Table Z1, Table Z2, or Table 3A or 3B of PCT Pub. No.: WO/2021/178717. In some embodiments, DNA binding domains can be identified based upon homology to other known DNA binding domains using tools as Basic Local Alignment Search Tool (BLAST). In still other embodiments, DNA-binding domains are modified, for example by site-specific mutation. In some embodiments, the DNA binding domain is altered from its natural sequence to have altered codon usage, e.g. improved for human cells.

[0338] In embodiments, the DNA binding domain comprises one or more modifications relative to a wild-type DNA binding domain, e.g., a modification via directed evolution, e.g., phage-assisted continuous evolution (PACE).

[0339] In certain aspects of the present invention, the host DNA-binding site integrated into by the gene modifying system can be in a gene, in an intron, in an exon, an ORF, outside of a coding region of any gene, in a regulatory region of a gene, or outside of a regulatory region of a gene. In other aspects, the engineered retrotransposon may bind to one or more than one host DNA sequence. In other aspects, the engineered retrotransposon may have low sequence specificity, e.g., bind to multiple sequences or lack sequence preference.

[0340] In some embodiments, a gene modifying system is used to edit a target locus in multiple alleles. In some embodiments, a gene modifying system is designed to edit a specific allele. For example, a gene modifying polypeptide may be directed to a specific sequence that is only present on one allele, e.g., comprises a template RNA with homology to a target allele, e.g., an annealing domain, but not to a second cognate allele. In some embodiments, a gene modifying system can alter a haplotype-specific allele. In some embodiments, a gene modifying system that targets a specific allele preferentially targets that allele, e.g., has at least a 2, 4, 6, 8, or 10-fold preference for a target allele.

### Localization Sequences for Gene Modifying Systems

[0341] In certain embodiments, a gene modifying system RNA further comprises an intracellular localization sequence, e.g., a nuclear localization sequence.

[0342] The nuclear localization sequence may be an RNA sequence that promotes the import of the RNA into the nucleus. In certain embodiments, the nuclear localization signal is located on the template RNA. In certain embodiments, the retrotransposase polypeptide is encoded on a first RNA, and the template RNA is a second, separate, RNA, and the nuclear localization signal is located on the template RNA and not on an RNA encoding the retrotransposase polypeptide. While not wishing to be bound by theory, in some embodiments, the RNA encoding the retrotransposase is targeted primarily to the cytoplasm to promote its translation, while the template RNA is targeted primarily to the nucleus to promote its retrotransposition into the genome. In some embodiments, the nuclear localization signal is at the 3′ end, 5′ end, or in an internal region of the template RNA. In some embodiments the nuclear localization signal is 3′ of the heterologous sequence (e.g., is directly 3′ of the heterologous sequence) or is 5′ of the heterologous sequence (e.g., is directly 5′ of the heterologous sequence). In some embodiments, the nuclear localization signal is placed outside of the 5′ UTR or outside of the 3′ UTR of the template RNA. In some embodiments the nuclear localization signal is placed between the 5′ UTR and the 3′ UTR, wherein optionally the nuclear localization signal is not transcribed with the transgene (e.g., the nuclear localization signal is an anti-sense orientation or is downstream of a transcriptional termination signal or polyadenylation signal). In some embodiments, the nuclear localization sequence is situated inside of an intron. In some embodiments a plurality of the same or different nuclear localization signals are in the RNA, e.g., in the template RNA. In some embodiments, the nuclear localization signal is less than 5, 10, 25, 50, 75, 100, 150, 200, 250, 300, 350, 400, 450, 500, 600, 700, 800, 900, or 1000 bp in length. Various RNA nuclear localization sequences can be used. For example, Lubelsky and Ulitsky, Nature 555 (107-111), 2018 describe RNA sequences, which drive RNA localization into the nucleus. In some embodiments, the nuclear localization signal is a SINE-derived nuclear RNA localization (SIRLOIN) signal. In some embodiments, the nuclear localization signal binds a nuclear-enriched protein. In some embodiments, the nuclear localization signal binds the HNRNPK protein. In some embodiments the nuclear localization signal is rich in pyrimidines, e.g., is a C/T rich, C/U rich, C rich, T rich, or U rich region. In some embodiments, the nuclear localization signal is derived from a long non-coding RNA. In some embodiments, the nuclear localization signal is derived from MALAT1 long non-coding RNA or is the 600 nucleotide M region of MALAT1 (described in Miyagawa et al., RNA 18, (738-751), 2012). In some embodiments, the nuclear localization signal is derived from BORG long non-coding RNA or is a AGCCC motif (described in Zhang et al., Molecular and Cellular Biology 34, 2318-2329 (2014). In some embodiments, the nuclear localization sequence is described in Shukla et al., The EMBO Journal e98452 (2018). In some embodiments, the nuclear localization signal is derived from a non-LTR retrotransposon, an LTR retrotransposon, retrovirus, or an endogenous retrovirus.

[0343] In some embodiments, a polypeptide described herein comprises one or more (e.g., 2, 3, 4, 5) nuclear targeting sequences, for example, a nuclear localization sequence (NLS), e.g., as described above. In some embodiments, the NLS is a bipartite NLS. In some embodiments, an NLS facilitates the import of a protein comprising an NLS into the cell nucleus. In some embodiments, the NLS is fused to the N-terminus of a gene modifying polypeptide described herein. In some embodiments, the NLS is fused to the C-terminus of the gene modifying polypeptide. In some embodiments, a linker sequence is disposed between the NLS and the neighboring domain of the gene modifying polypeptide.

[0344] In some embodiments, an NLS comprises the amino acid sequence

(SEQ ID NO: 9)
MDSLLMNRRKFLYQFKNVRWAKGRRETYLC,
(SEQ ID NO: 10)
PKKRKVEGADKRTADGSEFESPKKKRKV,
(SEQ ID NO: 11)
RKSGKIAAIWKRPRKPKKKRKV
(SEQ ID NO: 12)
KRTADGSEFESPKKKRKV,
(SEQ ID NO: 13)
KKTELQTTNAENKTKKL,
or
(SEQ ID NO: 14)
KRGINDRNFWRGENGRKTR,
(SEQ ID NO: 15)
KRPAATKKAGQAKKKK,
(SEQ ID NO: 344)
PAAKRVKLD,
(SEQ ID NO: 349)
KRTADGSEFEKRTADGSEFESPKKKAKVE,
(SEQ ID NO: 350)
KRTADGSEFE,
(SEQ ID NO: 351)
KRTADGSEFESPKKKAKVE,
(SEQ ID NO: 4001)
AGKRTADGSEFEKRTADGSEFESPKKKAKVE,
or
a functional fragment or variant thereof.

[0345] In some embodiments, a gene modifying polypeptide comprises an NLS as comprised in SEQ ID NO: 4000 and/or SEQ ID NO: 4001, or an NLS having an amino acid sequence having at least 75%, 80%, 85%, 90%, 95%, 96%, 97%, 98%, or 99% identity thereto.

[0346] Exemplary NLS sequences are also described in PCT/EP2000/011690, the contents of which are incorporated herein by reference for their disclosure of exemplary nuclear localization sequences. In some embodiments, an NLS comprises an amino acid sequence as disclosed in Table 8. An NLS of this table may be utilized with one or more copies in a polypeptide in one or more locations in a polypeptide, e.g., 1, 2, 3 or more copies of an NLS in an N-terminal domain, between peptide domains, in a C-terminal domain, or in a combination of locations, in order to improve subcellular localization to the nucleus. Multiple unique sequences may be used within a single polypeptide. Sequences may be naturally monopartite or bipartite, e.g., having one or two stretches of basic amino acids, or may be used as chimeric bipartite sequences. Sequence references correspond to UniProt accession numbers, except where indicated as SeqNLS for sequences mined using a subcellular localization prediction algorithm (Lin et al BMC Bioinformat 13:157 (2012), incorporated herein by reference in its entirety).

TABLE 8
Exemplary nuclear localization signals for use in gene modifying systems

| Sequence | Sequence References | SEQ ID No. |
|---|---|---|
| AHFKISGEKRPSTDPGKKAK | Q76IQ7 | 223 |
| NPKKKKKKDP | | |
| AHRAKKMSKTHA | P21827 | 224 |
| ASPEYVNLPINGNG | SeqNLS | 225 |
| CTKRPRW | O88622, Q86W56, Q9QYM2, O02776 | 226 |
| DKAKRVSRNKSEKKRR | O15516, Q5RAK8, Q91YB2, Q91YB0, | 227 |
| | Q8QGQ6, O08785, Q9WVS9, Q6YGZ4 | |
| EELRLKEELLKGIYA | Q9QY16, Q9UHL0, Q2TBP1, Q9QY15 | 228 |
| EEQLRRRKNSRLNNTG | G5EFF5 | 229 |
| EVLKVIRTGKRKKKAWKR | SeqNLS | 230 |
| MVTKVC | | |
| HHHHHHHHHHHHQPH | Q63934, G3V7L5, Q12837 | 231 |
| HKKKHPDASVNFSEFSK | P10103, Q4R844, P12682, B0CM99, | 232 |
| | A9RA84, Q6YKA4, P09429, P63159, | |
| | Q08IE6, P63158, Q9YH06, B1MTB0 | |
| HKRTKK | Q2R2D5 | 233 |
| IINGRKLKLKKSRRRSSQTS | SeqNLS | 234 |
| NNSFTSRRS | | |
| KAEQERRK | Q8LH59 | 235 |
| KEKRKRREELFIEQKKRK | SeqNLS | 236 |
| KKGKDEWFSRGKKP | P30999 | 237 |
| KKGPSVQKRKKT | Q6ZN17 | 238 |
| KKKTVINDLLHYKKEK | SeqNLS, P32354 | 239 |
| KKNGGKGKNKPSAKIKK | SegNLS | 240 |
| KKPKWDDFKKKKK | Q15397, Q8BKS9, Q562C7 | 241 |
| KKRKKD | SeqNLS, Q91Z62, Q1A730, Q969P5, | 242 |
| | Q2KHT6, Q9CPU7 | |
| KKRRKRRRK | SeqNLS | 243 |
| KKRRRRARK | Q9UMS6, D4A702, Q91YE8 | 244 |
| KKSKRGR | Q9UBS0 | 245 |
| KKSRKRGS | B4FG96 | 246 |
| KKSTALSRELGKIMRRR | SeqNLS, P32354 | 247 |
| KKSYQDPEIIAHSRPRK | Q9U7C9 | 248 |
| KKTGKNRKLKSKRVKTR | Q9Z301, O54943, Q8K3T2 | 249 |
| KKVSIAGQSGKLWRWKR | Q6YUL8 | 250 |
| KKYENVVIKRSPRKRGRPR | SeqNLS | 251 |
| K | | |
| KNKKRK | SeqNLS | 252 |
| KPKKKR | ScqNLS | 253 |
| KRAMKDDSHGNSTSPKRRK | Q0E671 | 254 |
| KRANSNLVAAYEKAKKK | P23508 | 255 |
| KRASEDTTSGSPPKKSSAGP | Q9BZZ5, Q5R644 | 256 |
| KR | | |
| KRFKRRWMVRKMKTKK | SeqNLS | 257 |
| KRGLNSSFETSPKKVK | Q8IV63 | 258 |
| KRGNSSIGPNDLSKRKQRK | SeqNLS | 259 |
| K | | |
| KRIHSVSLSQSQIDPSKKVK | ScqNLS | 260 |
| RAK | | |
| KRKGKLKNKGSKRKK | O15381 | 261 |
| KRRRRRRREKRKR | Q96GM8 | 262 |
| KRSNDRTYSPEEEKQRRA | Q91ZF2 | 263 |
| KRTVATNGDASGAHRAKK | SeqNLS | 264 |
| MSK | | |
| KRVYNKGEDEQEHLPKGKK | SeqNLS | 265 |
| R | | |
| KSGKAPRRRAVSMDNSNK | Q9WVH4, O43524 | 266 |
| KVNFLDMSLDDIIIYKELE | Q9P127 | 267 |
| KVQHRIAKKTTRRRR | Q9DXE6 | 268 |
| LSPSLSPL | Q9Y261, P32182, P35583 | 269 |
| MDSLLMNRRKFLYQFKNVR | Q9GZX7 | 270 |
| WAKGRRETYLC | | |
| MPQNEYIELHRKRYGYRLD | SeqNLS | 271 |
| YHEKKRKKESREAHERSKK | | |
| AKKMIGLKAKLYHK | | |
| MVQLRPRASR | SeqNLS | 272 |
| NNKLLAKRRKGGASPKDDP | Q965G5 | 273 |
| MDDIK | | |
| NYKRPMDGTYGPPAKRHEG | O14497, A2BH40 | 274 |
| E | | |
| PDTKRAKLDSSETTMVKKK | SeqNLS | 275 |
| PEKRTKI | SeqNLS | 276 |
| PGGRGKKK | Q719N1, Q9UBP0, A2VDN5 | 277 |
| PGKMDKGEHRQERRDRPY | Q01844, Q61545 | 278 |
| PKKGDKYDKTD | Q45FA5 | 279 |
| PKKKSRK | O35914, Q01954 | 280 |
| PKKNKPE | Q22663 | 281 |
| PKKRAKV | P04295, P89438 | 282 |
| PKPKKLKVE | P55263, P55262, P55264, Q64640 | 283 |
| PKRGRGR | Q9FYS5, Q43386 | 284 |
| PKRRLVDDA | P0C797 | 285 |
| PKRRRTY | SeqNLS | 286 |
| PLFKRR | A8X6H4, Q9TXJ0 | 287 |
| PLRKAKR | Q86WB0, Q5R8V9 | 288 |
| PPAKRKCIF | Q6AZ28, O75928, Q8C5D8 | 289 |
| PPARRRRL | Q8NAG6 | 290 |
| PPKKKRKV | Q3L6L5, P03070, P14999, P03071 | 291 |
| PPNKRMKVKH | Q8BN78 | 292 |
| PPRIYPQLPSAPT | P0C799 | 293 |
| PQRSPFPKSSVKR | SeqNLS | 294 |
| PRPRKVPR | P0C799 | 295 |
| PRRRVQRKR | SeqNLS, Q5R448, Q5TAQ9 | 296 |
| PRRVRLK | Q58DJ0, P56477, Q13568 | 297 |
| PSRKRPR | Q62315, Q5F363, Q92833 | 298 |
| PSSKKRKV | SeqNLS | 299 |
| PTKKRVK | P07664 | 300 |
| QRPGPYDRP | SeqNLS | 301 |
| RGKGGKGLGKGGAKRHRK | SeqNLS | 302 |
| RKAGKGGGGHKTTKKRSA | B4FG96 | 303 |
| KDEKVP | | |
| RKIKLKRAK | A1L3G9 | 304 |
| RKIKRKRAK | B9X187 | 305 |
| RKKEAPGPREELRSRGR | O35126, P54258, Q5IS70, P54259 | 306 |
| RKKRKGK | SeqNLS, Q29243, Q62165, Q28685, | 307 |
| | O18738, Q9TSZ6, Q14118 | |
| RKKRRQRRR | P04326, P69697, P69698, P05907, | 308 |
| | P20879, P04613, P19553, P0C1J9, | |
| | P20893, P12506, P04612, Q73370, | |
| | P0CIK0, P05906, P35965, P04609, | |
| | P04610, P04614, P04608, P05905 | |
| RKKSIPLSIKNLKRKHKRKK | Q9C0C9 | 309 |
| NKITR | | |
| RKLVKPKNTKMKTKLRTNP | Q14190 | 310 |
| Y | | |
| RKRLILSDKGQLDWKK | SeqNLS, Q91Z62, Q1A730, Q2KHT6, | 311 |
| | Q9CPU7 | |
| RKRLKSK | Q13309 | 312 |
| RKRRVRDNM | Q8QPH4, Q809M7, A8C8X1, Q2VNC5, | 313 |
| | Q38SQ0, 089749, Q6DNQ9, Q809L9, | |
| | Q0A429, Q20NV3, P16509, P16505, | |
| | Q6DNQ5, P16506, Q6XT06, P26118, | |
| | Q2ICQ2, Q2RCG8, Q0A2D0, Q0A2H9, | |
| | Q9IQ46, Q809M3, Q6J847, Q6J856, | |
| | B4URE4, A4GCM7, Q0A440, P26120, | |
| | P16511, | |
| RKRSPKDKKEKDLDGAGKR | Q7RTP6 | 314 |
| RKT | | |
| RKRTPRVDGQTGENDMNK | O94851 | 315 |
| RRRK | | |
| RLPVRRRRRR | P04499, P12541, P03269, P48313, | 316 |
| | P03270 | |
| RLRFRKPKSK | P69469 | 317 |
| RQQRKR | Q14980 | 318 |
| RRDLNSSFETSPKKVK | Q8K3G5 | 319 |
| RRDRAKLR | Q9SLB8 | 320 |
| RRGDGRRR | Q80WE1, Q5R9B4, Q06787, P35922 | 321 |
| RRGRKRKAEKQ | Q812D1, Q5XXA9, Q99JF8, Q8MJG1, | 322 |
| | Q66T72, O75475 | |
| RRKKRR | Q0VD86, Q58DS6, Q5R6G2, Q9ERI5, | 323 |
| | Q6AYK2, Q6NYC1 | |
| RRKRSKSEDMDSVESKRRR | Q7TT18 | 324 |
| RRKRSR | Q99PU7, D3ZHS6, Q92560, A2VDM8 | 325 |
| RRPKGKTLQKRKPK | Q6ZN17 | 326 |
| RRRGFERFGPDNMGRKRK | Q63014, Q9DBR0 | 327 |
| RRRGKNKVAAQNCRK | SeqNLS | 328 |
| RRRKRR | Q5FVH8, Q6MZT1, Q08DH5, Q8BQP9 | 329 |
| RRRQKQKGGASRRR | SeqNLS | 330 |
| RRRREGPRARRRR | P08313, P10231 | 331 |
| RRTIRLKLVYDKCDRSCKIQ | SeqNLS | 332 |
| KKNRNKCQYCRFHKCLSVG | | |
| MSHNAIRFGRMPRSEKAKL | | |
| KAE | | |
| RRVPQRKEVSRCRKCRK | Q5RJN4, Q32L09, Q8CAK3, Q9NUL5 | 333 |
| RVGGRRQAVECIEDLLNEP | P03255 | 334 |
| GQPLDLSCKRPRP | | |
| RVVKLRIAP | P52639, Q8JMN0 | 335 |
| RVVRRR | P70278 | 336 |
| SKRKTKISRKTR | Q5RAY1, O00443 | 337 |
| SYVKTVPNRTRTYIKL | P21935 | 338 |
| TGKNEAKKRKIA | P52739, Q8K3J5, Q5RAU9 | 339 |
| TLSPASSPSSVSCPVIPASTD | SeqNLS | 340 |
| ESPGSALNI | | |
| VSKKQRTGKKIH | P52739, Q8K3J5, Q5RAU9 | 341 |
| SPKKKRKVE | | 342 |
| KRTAD GSEFE SPKKKRKVE | | 343 |
| PAAKRVKLD | | 344 |
| PKKKRKV | | 345 |
| MDSLLMNRRKFLYQFKNVR | | 346 |
| WAKGRRETYLC | | |
| SPKKKRKVEAS | | 347 |
| MAPKKKRKVGIHRGVP | | 348 |
| KRTADGSEFEKRTADGSEFE | | 349 |
| SPKKKAKVE | | |
| KRTADGSEFE | | 350 |
| KRTADGSEFESPKKKAKVE | | 351 |
| AGKRTADGSEFEKRTADGS | | 4001 |
| EFESPKKKAKVE | | |

[0347] In some embodiments, the NLS is a bipartite NLS. A bipartite NLS typically comprises two basic amino acid clusters separated by a spacer sequence (which may be, e.g., about 10 amino acids in length). A monopartite NLS typically lacks a spacer. An example of a bipartite NLS is the nucleoplasmin NLS, having the sequence KR[PAATKKAGQA]KKKK (SEQ ID NO: 15), wherein the spacer is bracketed. Another exemplary bipartite NLS has the sequence PKKKRKVEGADKRTADGSEFFSPKKKRKV (SEQ ID NO: 16). Exemplary NLSs are described in International Application WO2020051561, which is herein incorporated by reference in its entirety, including for its disclosures regarding nuclear localization sequences.

[0348] In certain embodiments, a gene modifying system polypeptide further comprises an intracellular localization sequence, e.g., a nuclear localization sequence and/or a nucleolar localization sequence. The nuclear localization sequence and/or nucleolar localization sequence may be amino acid sequences that promote the import of the protein into the nucleus and/or nucleolus, where it can promote integration of heterologous sequence into the genome. In certain embodiments, a gene modifying system polypeptide (e.g., a retrotransposase, e.g., a polypeptide according to Table R1 herein) further comprises a nucleolar localization sequence. In certain embodiments, the retrotransposase polypeptide is encoded on a first RNA, and the template RNA is a second, separate, RNA, and the nucleolar localization signal is encoded on the RNA encoding the retrotransposase polypeptide and not on the template RNA. In some embodiments, the nucleolar localization signal is located at the N-terminus, C-terminus, or in an internal region of the polypeptide. In some embodiments, a plurality of the same or different nucleolar localization signals are used. In some embodiments, the nuclear localization signal is less than 5, 10, 25, 50, 75, or 100 amino acids in length. Various polypeptide nucleolar localization signals can be used. For example, Yang et al., Journal of Biomedical Science 22, 33 (2015), describe a nuclear localization signal that also functions as a nucleolar localization signal. In some embodiments, the nucleolar localization signal may also be a nuclear localization signal. In some embodiments, the nucleolar localization signal may overlap with a nuclear localization signal. In some embodiments, the nucleolar localization signal may comprise a stretch of basic residues. In some embodiments, the nucleolar localization signal may be rich in arginine and lysine residues. In some embodiments, the nucleolar localization signal may be derived from a protein that is enriched in the nucleolus. In some embodiments, the nucleolar localization signal may be derived from a protein enriched at ribosomal RNA loci. In some embodiments, the nucleolar localization signal may be derived from a protein that binds rRNA. In some embodiments, the nucleolar localization signal may be derived from MSP58. In some embodiments, the nucleolar localization signal may be a monopartite motif. In some embodiments, the nucleolar localization signal may be a bipartite motif. In some embodiments, the nucleolar localization signal may consist of a multiple monopartite or bipartite motifs. In some embodiments, the nucleolar localization signal may consist of a mix of monopartite and bipartite motifs. In some embodiments, the nucleolar localization signal may be a dual bipartite motif. In some embodiments, the nucleolar localization motif may be a KRASSQALGTIPKRRSSSRFIKRKK (SEQ ID NO: 17). In some embodiments, the nucleolar localization signal may be derived from nuclear factor-κB-inducing kinase. In some embodiments, the nucleolar localization signal may be an RKKRKKK motif (SEQ ID NO: 18) (described in Birbach et al., Journal of Cell Science, 117 (3615-3624), 2004).

[0349] In some embodiments, a nucleic acid described herein (e.g., an RNA encoding a gene modifying polypeptide, or a DNA encoding the RNA) comprises a microRNA binding site. In some embodiments, the microRNA binding site is used to increase the target-cell specificity of a gene modifying system. For instance, the microRNA binding site can be chosen on the basis that is recognized by a miRNA that is present in a non-target cell type, but that is not present (or is present at a reduced level relative to the non-target cell) in a target cell type. Thus, when the RNA encoding the gene modifying polypeptide is present in a non-target cell, it would be bound by the miRNA, and when the RNA encoding the gene modifying polypeptide is present in a target cell, it would not be bound by the miRNA (or bound but at reduced levels relative to the non-target cell). While not wishing to be bound by theory, binding of the miRNA to the RNA encoding the gene modifying polypeptide may reduce production of the gene modifying polypeptide, e.g., by degrading the mRNA encoding the polypeptide or by interfering with translation. Accordingly, the heterologous object sequence would be inserted into the genome of target cells more efficiently than into the genome of non-target cells. A system having a microRNA binding site in the RNA encoding the gene modifying polypeptide (or encoded in the DNA encoding the RNA) may also be used in combination with a template RNA that is regulated by a second microRNA binding site, e.g., as described herein in the section entitled “Template RNA component of gene modifying system.”

[0350] In some embodiments, a polypeptide for use in any of the systems described herein can be a molecular reconstruction or ancestral reconstruction based upon the aligned polypeptide sequence of multiple retrotransposons. In some embodiments, a 5′ or 3′ untranslated region for use in any of the systems described herein can be a molecular reconstruction based upon the aligned 5′ or 3′ untranslated region of multiple retrotransposons. Based on the Accession numbers, polypeptides or nucleic acid sequences can be aligned, e.g., by using routine sequence analysis tools as Basic Local Alignment Search Tool (BLAST) or CD-Search for conserved domain analysis. Molecular reconstructions can be created based upon sequence consensus, e.g. using approaches described in Ivics et al., Cell 1997, 501 510; Wagstaff et al., Molecular Biology and Evolution 2013, 88-99. In some embodiments, the retrotransposon from which the 5′ or 3′ untranslated region or polypeptide is derived is a young or a recently active mobile element, as assessed via phylogenetic methods such as those described in Boissinot et al., Molecular Biology and Evolution 2000, 915-928.

### Linkers

[0351] In some embodiments, domains of the compositions and systems described herein (e.g., the endonuclease and reverse transcriptase domains of a polypeptide or the DNA binding domain and reverse transcriptase domains of a polypeptide) may be joined by a linker. A composition described herein comprising a linker element has the general form S1-L-S2, wherein S1 and S2 may be the same or different and represent two domain moieties (e.g., each a polypeptide or nucleic acid domain) associated with one another by the linker. In some embodiments, a linker may connect two polypeptides. In some embodiments, a linker may connect two nucleic acid molecules. In some embodiments, a linker may connect a polypeptide and a nucleic acid molecule. A linker may be a chemical bond, e.g., one or more covalent bonds or non-covalent bonds. A linker may be flexible, rigid, and/or cleavable. In some embodiments, the linker is a peptide linker. Generally, a peptide linker is at least 2, 3, 4, 5, 6, 7, 8, 9, 10 or more amino acids in length, e.g., 2-50 amino acids in length, 2-30 amino acids in length.

[0352] Some commonly used flexible linkers have sequences consisting primarily of stretches of Gly and Ser residues (“GS” linker). Flexible linkers may be useful for joining domains that require a certain degree of movement or interaction and may include small, non-polar (e.g. Gly) or polar (e.g. Ser or Thr) amino acids. Incorporation of Ser or Thr can also maintain the stability of the linker in aqueous solutions by forming hydrogen bonds with the water molecules, and therefore reduce unfavorable interactions between the linker and the other moieties. Examples of such linkers include those having the structure [GGS]^{≥1} or [GGGS]^{≥1} (SEQ ID NO: 1536). Rigid linkers are useful to keep a fixed distance between domains and to maintain their independent functions. Rigid linkers may also be useful when a spatial separation of the domains is critical to preserve the stability or bioactivity of one or more components in the agent. Rigid linkers may have an alpha helix-structure or Pro-rich sequence, (XP)n, with X designating any amino acid, preferably Ala, Lys, or Glu. Cleavable linkers may release free functional domains in vivo. In some embodiments, linkers may be cleaved under specific conditions, such as the presence of reducing reagents or proteases. In vivo cleavable linkers may utilize the reversible nature of a disulfide bond. One example includes a thrombin-sensitive sequence (e.g., PRS) between the two Cys residues. In vitro thrombin treatment of CPRSC (SEQ ID NO: 1537) results in the cleavage of the thrombin-sensitive sequence, while the reversible disulfide linkage remains intact. Such linkers are known and described, e.g., in Chen et al. 2013. Fusion Protein Linkers: Property, Design and Functionality. Adv Drug Deliv Rev. 65(10): 1357-1369. In vivo cleavage of linkers in compositions described herein may also be carried out by proteases that are expressed in vivo under pathological conditions (e.g. cancer or inflammation), in specific cells or tissues, or constrained within certain cellular compartments. The specificity of many proteases offers slower cleavage of the linker in constrained compartments.

[0353] In some embodiments the amino acid linkers are (or are homologous to) the endogenous amino acids that exist between such domains in a native polypeptide. In some embodiments, the endogenous amino acids that exist between such domains are substituted but the length is unchanged from the natural length. In some embodiments, additional amino acid residues are added to the naturally existing amino acid residues between domains.

[0354] In some embodiments, the amino acid linkers are designed computationally or screened to maximize protein function (Anad et al., FEBS Letters, 587:19, 2013).

In addition to being fully encoded on a single transcript, a polypeptide can be generated by separately expressing two or more polypeptide fragments that reconstitute the holoenzyme. In some embodiments, the gene modifying polypeptide is generated by expressing as separate subunits that reassemble the holoenzyme through engineered protein-protein interactions. In some embodiments, reconstitution of the holoenzyme does not involve covalent binding between subunits. Peptides may also fuse together through trans-splicing of inteins (Tornabene et al. Sci Transl Med 11, eaav4523 (2019)). In some embodiments, the gene modifying holoenzyme is expressed as separate subunits that are designed to create a fusion protein through the presence of split inteins (e.g., as described herein) in the subunits. In some embodiments, the gene modifying holoenzyme is reconstituted through the formation of covalent linkages between subunits. In some embodiments, the breaking up of a gene modifying polypeptide into subunits may aid in delivery of the protein by keeping the nucleic acid encoding each part within optimal packaging limits of a viral delivery vector, e.g., AAV (Tornabene et al. Sci Transl Med 11, eaav4523 (2019)). In some embodiments, the gene modifying polypeptide is designed to be dimerized through the use of covalent or non-covalent interactions as described above. Exemplary Linkers are shown in Table L1 below.

TABLE L1
Exemplary linker sequences

| | SEQ |
|---|---|
| | ID |
| Amino Acid Sequence | NO |
| GGS | |
| GGSGGS | 102 |
| GGSGGSGGS | 103 |
| GGSGGSGGSGGS | 104 |
| GGSGGSGGSGGSGGS | 105 |
| GGSGGSGGSGGSGGSGGS | 106 |
| GGGGS | 107 |
| GGGGSGGGGS | 108 |
| GGGGSGGGGSGGGGS | 109 |
| GGGGSGGGGGGGGSGGGGS | 110 |
| GGGGSGGGGSGGGGSGGGGSGGGGS | 111 |
| GGGGSGGGGSGGGGSGGGGSGGGGSGGGGS | 112 |
| GGG | |
| GGGG | 114 |
| GGGGG | 115 |
| GGGGGG | 116 |
| GGGGGGG | 117 |
| GGGGGGGG | 118 |
| GSS | |
| GSSGSS | 120 |
| GSSGSSGSS | 121 |
| GSSGSSGSSGSS | 122 |
| GSSGSSGSSGSSGSS | 123 |
| GSSGSSGSSGSSGSSGSS | 124 |
| EAAAK | 125 |
| EAAAKEAAAK | 126 |
| EAAAKEAAAKEAAAK | 127 |
| EAAAKEAAAKEAAAKEAAAK | 128 |
| EAAAKEAAAKEAAAKEAAAKEAAAK | 129 |
| EAAAKEAAAKEAAAKEAAAKEAAAKEAAAK | 130 |
| PAP | |
| PAPAP | 132 |
| PAPAPAP | 133 |
| PAPAPAPAP | 134 |
| PAPAPAPAPAP | 135 |
| PAPAPAPAPAPAP | 136 |
| GGSGGG | 137 |
| GGGGGS | 138 |
| GGSGSS | 139 |
| GSSGGS | 140 |
| GGSEAAAK | 141 |
| EAAAKGGS | 142 |
| GGSPAP | 143 |
| PAPGGS | 144 |
| GGGGSS | 145 |
| GSSGGG | 146 |
| GGGEAAAK | 147 |
| EAAAKGGG | 148 |
| GGGPAP | 149 |
| PAPGGG | 150 |
| GSSEAAAK | 151 |
| EAAAKGSS | 152 |
| GSSPAP | 153 |
| PAPGSS | 154 |
| EAAAKPAP | 155 |
| PAPEAAAK | 156 |
| GGSGGGGSS | 157 |
| GGSGSSGGG | 158 |
| GGGGGSGSS | 159 |
| GGGGSSGGS | 160 |
| GSSGGSGGG | 161 |
| GSSGGGGGS | 162 |
| GGSGGGEAAAK | 163 |
| GGSEAAAKGGG | 164 |
| GGGGGSEAAAK | 165 |
| GGGEAAAKGGS | 166 |
| EAAAKGGSGGG | 167 |
| EAAAKGGGGGS | 168 |
| GGSGGGPAP | 169 |
| GGSPAPGGG | 170 |
| GGGGGSPAP | 171 |
| GGGPAPGGS | 172 |
| PAPGGSGGG | 173 |
| PAPGGGGGS | 174 |
| GGSGSSEAAAK | 175 |
| GGSEAAAKGSS | 176 |
| GSSGGSEAAAK | 177 |
| GSSEAAAKGGS | 178 |
| EAAAKGGSGSS | 179 |
| EAAAKGSSGGS | 180 |
| GGSGSSPAP | 181 |
| GGSPAPGSS | 182 |
| GSSGGSPAP | 183 |
| GSSPAPGGS | 184 |
| PAPGGSGSS | 185 |
| PAPGSSGGS | 186 |
| GGSEAAAKPAP | 187 |
| GGSPAPEAAAK | 188 |
| EAAAKGGSPAP | 189 |
| EAAAKPAPGGS | 190 |
| PAPGGSEAAAK | 191 |
| PAPEAAAKGGS | 192 |
| GGGGSSEAAAK | 193 |
| GGGEAAAKGSS | 194 |
| GSSGGGEAAAK | 195 |
| GSSEAAAKGGG | 196 |
| EAAAKGGGGSS | 197 |
| EAAAKGSSGGG | 198 |
| GGGGSSPAP | 199 |
| GGGPAPGSS | 200 |
| GSSGGGPAP | 201 |
| GSSPAPGGG | 202 |
| PAPGGGGSS | 203 |
| PAPGSSGGG | 204 |
| GGGEAAAKPAP | 205 |
| GGGPAPEAAAK | 206 |
| EAAAKGGGPAP | 207 |
| EAAAKPAPGGG | 208 |
| PAPGGGEAAAK | 209 |
| PAPEAAAKGGG | 210 |
| GSSEAAAKPAP | 211 |
| GSSPAPEAAAK | 212 |
| EAAAKGSSPAP | 213 |
| EAAAKPAPGSS | 214 |
| PAPGSSEAAAK | 215 |
| PAPEAAAKGSS | 216 |
| AEAAAKEAAAKEAAAKEAAAKALEAEAAAKEAAAKEAAAK | 217 |
| EAAAKA | |
| GGGGSEAAAKGGGGS | 218 |
| EAAAKGGGGSEAAAK | 219 |
| SGSETPGTSESATPES | 220 |
| GSAGSAAGSGEF | 221 |
| SGGSSGGSSGSETPGTSESATPESSGGSSGGSS | 222 |
| GSTSGSGKPGSGEGSTKG | 15520 |

[0355] In some embodiments, a linker of a gene modifying polypeptide comprises a motif chosen from: (SGGS)ₙ (SEQ ID NO: 25), (GGGS)ₙ (SEQ ID NO: 26), (GGGGS)ₙ (SEQ ID NO: 27), (G)ₙ, (EAAAK)ₙ (SEQ ID NO: 28), (GGS)ₙ, or (XP)ₙ.

### Inteins

[0356] In some embodiments, the gene modifying system comprises an intein. Generally, an intein comprises a polypeptide that has the capacity to join two polypeptides or polypeptide fragments together via a peptide bond. In some embodiments, the intein is a trans-splicing intein that can join two polypeptide fragments, e.g., to form the polypeptide component of a system as described herein. In some embodiments, an intein may be encoded on the same nucleic acid molecule encoding the two polypeptide fragments. In certain embodiments, the intein may be translated as part of a larger polypeptide comprising, e.g., in order, the first polypeptide fragment, the intein, and the second polypeptide fragment. In embodiments, the translated intein may be capable of excising itself from the larger polypeptide, e.g., resulting in separation of the attached polypeptide fragments. In embodiments, the excised intein may be capable of joining the two polypeptide fragments to each other directly via a peptide bond. In some embodiments, as described in more detail below, Intein-N may be fused to the N-terminal portion of a first domain described herein, and and intein-C may be fused to the C-terminal portion of a second domain described herein for the joining of the N-terminal portion to the C-terminal portion, thereby joining the first and second domains. In some embodiments, the first and second domains are each independent chosen from a DNA binding domain, an RNA binding domain, an RT domain, and an endonuclease domain.

[0357] As used herein, “intein” refers to a self-splicing protein intron (e.g., peptide), e.g., which ligates flanking N-terminal and C-terminal exteins (e.g., fragments to be joined). An intein may, in some instances, comprise a fragment of a protein that is able to excise itself and join the remaining fragments (the exteins) with a peptide bond in a process known as protein splicing. Inteins are also referred to as “protein introns.” The process of an intein excising itself and joining the remaining portions of the protein is herein termed “protein splicing” or “intein-mediated protein splicing.” In some embodiments, an intein of a precursor protein (an intein containing protein prior to intein-mediated protein splicing) comes from two genes. Such intein is referred to herein as a split intein (e.g., split intein-N and split intein-C). For example, in cyanobacteria, DnaE, the catalytic subunit a of DNA polymerase III, is encoded by two separate genes, dnaE-n and dnaE-c. The intein encoded by the dnaE-n gene may be herein referred as “intein-N.” The intein encoded by the dnaE-c gene may be herein referred as “intein-C.”

[0358] Use of inteins for joining heterologous protein fragments is described, for example, in Wood et al., J. Biol. Chem. 289(21); 14512-9 (2014) (incorporated herein by reference in its entirety). For example, when fused to separate protein fragments, the inteins IntN and IntC may recognize each other, splice themselves out, and/or simultaneously ligate the flanking N- and C-terminal exteins of the protein fragments to which they were fused, thereby reconstituting a full-length protein from the two protein fragments.

[0359] In some embodiments, a synthetic intein based on the dnaE intein, the Cfa-N (e.g., split intein-N) and Cfa-C (e.g., split intein-C) intein pair, is used. Examples of such inteins have been described, e.g., in Stevens et al., J Am Chem Soc. 2016 Feb. 24; 138(7):2162-5 (incorporated herein by reference in its entirety). Non-limiting examples of intein pairs that may be used in accordance with the present disclosure include: Cfa DnaE intein, Ssp GyrB intein, Ssp DnaX intein, Ter DnaE3 intein, Ter ThyX intein, Rma DnaB intein and Cne Prp8 intein (e.g., as described in U.S. Pat. No. 8,394,604, incorporated herein by reference.

[0360] In some embodiments, a protein fragment ranges from about 2-1000 amino acids (e.g., between 2-10, 10-50, 50-100, 100-200, 200-300, 300-400, 400-500, 500-600, 600-700, 700-800, 800-900, or 900-1000 amino acids) in length. In some embodiments, a protein fragment ranges from about 5-500 amino acids (e.g., between 5-10, 10-50, 50-100, 100-200, 200-300, 300-400, or 400-500 amino acids) in length. In some embodiments, a protein fragment ranges from about 20-200 amino acids (e.g., between 20-30, 30-40, 40-50, 50-100, or 100-200 amino acids) in length.

[0361] In some embodiments, a portion or fragment of a gene modifying polypeptide is fused to an intein. The nuclease can be fused to the N-terminus or the C-terminus of the intein. In some embodiments, a portion or fragment of a fusion protein is fused to an intein and fused to an AAV capsid protein. The intein, nuclease and capsid protein can be fused together in any arrangement (e.g., nuclease-intein-capsid, intein-nuclease-capsid, capsid-intein-nuclease, etc.). In some embodiments, the N-terminus of an intein is fused to the C-terminus of a fusion protein and the C-terminus of the intein is fused to the N-terminus of an AAV capsid protein.

[0362] In some embodiments, an endonuclease domain is fused to intein-N and a polypeptide comprising an RT domain is fused to an intein-C.

[0363] Exemplary nucleotide and amino acid sequences of interns are provided below:

DnaE Intein-N DNA:
(SEQ ID NO: 15412)
TGCCTGTCATACGAAACCGAGATACTGACAGTAGAATATGGCCTTCTGCCAATCGGG
AAGATTGTGGAGAAACGGATAGAATGCACAGTTTACTCTGTCGATAACAATGGTAA
CATTTATACTCAGCCAGTTGCCCAGTGGCACGACCGGGGAGAGCAGGAAGTATTCG
AATACTGTCTGGAGGATGGAAGTCTCATTAGGGCCACTAAGGACCACAAATTTATG
ACAGTCGATGGCCAGATGCTGCCTATAGACGAAATCTTTGAGCGAGAGTTGGACCTC
ATGCGAGTTGACAACCTTCCTAAT
DnaE Intein-N Protein:
(SEQ ID NO: 15413)
CLSYETEILTVEYGLLPIGKIVEKRIECTVYSVDNNGNIYTQPVAQWHDRGEQEVFEYCL
EDGSLIRATKDHKFMTVDGQMLPIDEIFERELDLMRVDNLPN
DnaE Intein-C DNA:
(SEQ ID NO: 15414)
ATGATCAAGATAGCTACAAGGAAGTATCTTGGCAAACAAAACGTTTATGATATTGG
AGTCGAAAGAGATCACAACTTTGCTCTGAAGAACGGATTCATAGCTTCTAAT
Intein-C:
(SEQ ID NO: 15415)
MIKIATRKYLGKQNVYDIGVERDHNFALKNGFIASN
Cfa-N DNA:
(SEQ ID NO: 15416)
TGCCTGTCTTATGATACCGAGATACTTACCGTTGAATATGGCTTCTTGCCTATTGGAA
AGATTGTCGAAGAGAGAATTGAATGCACAGTATATACTGTAGACAAGAATGGTTTC
GTTTACACACAGCCCATTGCTCAATGGCACAATCGCGGCGAACAAGAAGTATTTGA
GTACTGTCTCGAGGATGGAAGCATCATACGAGCAACTAAAGATCATAAATTCATGA
CCACTGACGGGCAGATGTTGCCAATAGATGAGATATTCGAGCGGGGCTTGGATCTC
AAACAAGTGGATGGATTG CCA
Cfa-N Protein:
(SEQ ID NO: 15417)
CLSYDTEILTVEYGFLPIGKIVEERIECTVYTVDKNGFVYTQPIAQWHNRGEQEVFEYCL
EDGSIIRATKDHKFMTTDGQMLPIDEIFERGLDLKQVDGLP
Cfa-C DNA:
(SEQ ID NO: 15418)
ATGAAGAGGACTGCCGATGGATCAGAGTTTGAATCTCCCAAGAAGAAGAGGAAAGT
AAAGATAATATCTCGAAAAAGTCTTGGTACCCAAAATGTCTATGATATTGGAGTGGA
GAAAGATCACAACTTCCTTCTCAAGAACGGTCTCGTAGCCAGCAAC
Cfa-C Protein:
(SEQ ID NO: 15419)
MKRTADGSEFESPKKKRKVKIISRKSLGTQNVYDIGVEKDHNFLLKNGLVASN

### Promoters

[0364] In some embodiments, one or more promoter or enhancer elements are operably linked to a nucleic acid encoding a gene modifying protein or a template nucleic acid, e.g., that controls expression of the heterologous object sequence. In certain embodiments, the one or more promoter or enhancer elements comprise cell-type or tissue specific elements. In some embodiments, the promoter or enhancer is the same or derived from the promoter or enhancer that naturally controls expression of the heterologous object sequence. For example, the ornithine transcarbomylase promoter and enhancer may be used to control expression of the ornithine transcarbomylase gene in a system or method provided by the invention for correcting ornithine transcarbomylase deficiencies. In some embodiments, a promoter for use in the invention is for a gene described in Table 33 or 34, e.g., which may be used with an allele of the reference gene, or, in other embodiments, with a heterologous gene. In some embodiments, the promoter is a promoter of Table 33 or a functional fragment or variant thereof.

[0365] Exemplary tissue specific promoters that are commercially available can be found, for example, at a uniform resource locator (e.g., invivogen.com/tissue-specific-promoters). In some embodiments, a promoter is a native promoter or a minimal promoter, e.g., which consists of a single fragment from the 5′ region of a given gene. In some embodiments, a native promoter comprises a core promoter and its natural 5′ UTR. In some embodiments, the 5′ UTR comprises an intron. In other embodiments, these include composite promoters, which combine promoter elements of different origins or were generated by assembling a distal enhancer with a minimal promoter of the same origin.

[0366] Exemplary cell or tissue specific promoters are provided in the tables, below, and exemplary nucleic acid sequences encoding them are known in the art and can be readily accessed using a variety of resources, such as the NCBI database, including RefSeq, as well as the Eukaryotic Promoter Database (epd.epfl.ch//index.php).

TABLE 33
Exemplary cell or tissue-specific promoters

| Promoter | Target cells |
|---|---|
| B29 Promoter | B cells |
| CD14 Promoter | Monocytic Cells |
| CD43 Promoter | Leukocytes and platelets |
| CD45 Promoter | Hematopoeitic cells |
| CD68 promoter | macrophages |
| Desmin promoter | muscle cells |
| Elastase-1 | pancreatic acinar cells |
| promoter | |
| Endoglin promoter | endothelial cells |
| fibronectin | differentiating cells, healing |
| promoter | tissue |
| Flt-1 promoter | endothelial cells |
| GFAP promoter | Astrocytes |
| GPIIB promoter | megakaryocytes |
| ICAM-2 Promoter | Endothelial cells |
| INF-Beta promoter | Hematopoeitic cells |
| Mb promoter | muscle cells |
| Nphs1 promoter | podocytes |
| OG-2 promoter | Osteoblasts, Odonblasts |
| SP-B promoter | Lung |
| Syn1 promoter | Neurons |
| WASP promoter | Hematopoeitic cells |
| SV40/bAlb | Liver |
| promoter | |
| SV40/bAlb | Liver |
| promoter | |
| SV40/Cd3 | Leukocytes and platelets |
| promoter | |
| SV40/CD45 | hematopoeitic cells |
| promoter | |
| NSE/RU5′ | Mature Neurons |
| promoter | |

TABLE 34
Additional exemplary cell or tissue-specific promoters

| Promoter | Gene Description | Gene Specificity |
|---|---|---|
| APOA2 | Apolipoprotein A-II | Hepatocytes (from hepatocyte |
| | | progenitors) |
| SERPINA | Serpin peptidase inhibitor, clade A | Hepatocytes |
| 1 (hAAT) | (alpha-1 | (from definitive endoderm |
| | antiproteinase, antitrypsin), member 1 | stage) |
| | (also named alpha 1 anti-tryps in) | |
| CYP3A | Cytochrome P450, family 3, | Mature Hepatocytes |
| | subfamily A, polypeptide | |
| MIR122 | MicroRNA 122 | Hepatocytes |
| | | (from early stage embryonic |
| | | liver cells) |
| | | and endoderm |

Pancreatic specific promoters

| | | |
|---|---|---|
| INS | Insulin | Pancreatic beta cells |
| | | (from definitive endoderm stage) |
| IRS2 | Insulin receptor substrate 2 | Pancreatic beta cells |
| Pdx1 | Pancreatic and duodenal | Pancreas |
| | homeobox 1 | (from definitive endoderm stage) |
| Alx3 | Aristaless-like homeobox 3 | Pancreatic beta cells |
| | | (from definitive endoderm stage) |
| Ppy | Pancreatic polypeptide | PP pancreatic cells |
| | | (gamma cells) |

Cardiac specific promoters

| | | |
|---|---|---|
| Myh6 | Myosin, heavy chain 6, cardiac | Late differentiation marker of cardiac |
| (aMHC) | muscle, alpha | muscle cells (atrial specificity) |
| MYL2 | Myosin, light chain 2, regulatory, | Late differentiation marker of cardiac |
| (MLC-2v) | cardiac, slow | muscle cells (ventricular specificity) |
| ITNNl3 | Troponin I type 3 (cardiac) | Cardiomyocytes |
| (cTnl) | | (from immature state) |
| ITNNl3 | Troponin I type 3 (cardiac) | Cardiomyocytes |
| (cTnl) | | (from immature state) |
| NPPA | Natriuretic peptide precursor A (also | Atrial specificity in adult cells |
| (ANF) | named Atrial Natriuretic Factor) | |
| Slc8a1 | Solute carrier family 8 | Cardiomyocytes from early |
| (Ncx1) | (sodium/calcium exchanger), member | developmental stages |
| | 1 | |

CNS specific promoters

| | | |
|---|---|---|
| SYN1 | Synapsin I | Neurons |
| (hSyn) | | |
| GFAP | Glial fibrillary acidic protein | Astrocytes |
| INA | Internexin neuronal intermediate | Neuroprogenitors |
| | filament protein, alpha (a-internexin) | |
| NES | Nestin | Neuroprogenitors and ectoderm |
| MOBP | Myelin-associated oligodendrocyte | Oligodendrocytes |
| | basic protein | |
| MBP | Myelin basic protein | Oligodendrocytes |
| TH | Tyrosine hydroxylase | Dopaminergic neurons |
| FOXA2 | Forkhead box A2 | Dopaminergic neurons (also used as a |
| (HNF3 | | marker of endoderm) |
| beta) | | |

Skin specific promoters

| | | |
|---|---|---|
| FLG | Filaggrin | Keratinocytes from granular layer |
| K14 | Keratin 14 | Keratinocytes from granular |
| | | and basal layers |
| TGM3 | Transglutaminase 3 | Keratinocytes from granular layer |

Immune cell specific promoters

| | | |
|---|---|---|
| ITGAM | Integrin, alpha M (complement | Monocytes, macrophages, granulocytes, |
| (CD11B) | component 3 receptor 3 subunit) | natural killer cells |

Urogential cell specific promoters

| | | |
|---|---|---|
| Pbsn | Probasin | Prostatic epithelium |
| Upk2 | Uroplakin 2 | Bladder |
| Sbp | Spermine binding protein | Prostate |
| Fer1l4 | Fer-1-like 4 | Bladder |

Endothelial cell specific promoters

| | | |
|---|---|---|
| ENG | Endoglin | Endothelial cells |

Pluripotent and embryonic cell specific promoters

| | | |
|---|---|---|
| Oct4 | POU class 5 homeobox 1 | Pluripotent cells |
| (POU5F1) | | (germ cells, ES cells, iPS cells) |
| NANOG | Nanog homeobox | Pluripotent cells |
| | | (ES cells, iPS cells) |
| Synthetic | Synthetic promoter based on a Oct-4 | Pluripotent cells (ES cells, iPS cells) |
| Oct4 | core enhancer element | |
| T | Brachyury | Mesoderm |
| brachyury | | |
| NES | Nestin | Neuroprogenitors and Ectoderm |
| SOX17 | SRY (sex determining region Y)-box | Endoderm |
| | 17 | |
| FOXA2 | Forkhead box A2 | Endoderm (also used as a marker of |
| (HNFJ | | dopaminergic neurons) |
| beta) | | |
| MIR122 | MicroRNA 122 | Endoderm and hepatocytes |
| | | (from early stage embryonic liver cells~ |

[0367] Depending on the host/vector system utilized, any of a number of suitable transcription and translation control elements, including constitutive and inducible promoters, transcription enhancer elements, transcription terminators, etc. may be used in the expression vector (see e.g., Bitter et al. (1987) Methods in Enzymology, 153:516-544; incorporated herein by reference in its entirety).

[0368] In some embodiments, a nucleic acid encoding a gene modifying polypeptide or template nucleic acid is operably linked to a control element, e.g., a transcriptional control element, such as a promoter. The transcriptional control element may, in some embodiments, be functional in either a eukaryotic cell, e.g., a mammalian cell; or a prokaryotic cell (e.g., bacterial or archaeal cell). In some embodiments, a nucleotide sequence encoding a polypeptide is operably linked to multiple control elements, e.g., that allow expression of the nucleotide sequence encoding the polypeptide in both prokaryotic and eukaryotic cells.

[0369] For illustration purposes, examples of spatially restricted promoters include, but are not limited to, neuron-specific promoters, adipocyte-specific promoters, cardiomyocyte-specific promoters, smooth muscle-specific promoters, photoreceptor-specific promoters, etc. Neuron-specific spatially restricted promoters include, but are not limited to, a neuron-specific enolase (NSE) promoter (see, e.g., EMBL HSENO2, X51956); an aromatic amino acid decarboxylase (AADC) promoter, a neurofilament promoter (see, e.g., GenBank HUMNFL, L04147); a synapsin promoter (see, e.g., GenBank HUMSYNIB, M55301); a thy-1 promoter (see, e.g., Chen et al. (1987) Cell 51:7-19; and Llewellyn, et al. (2010) Nat. Med. 16(10):1161-1166); a serotonin receptor promoter (see, e.g., GenBank S62283); a tyrosine hydroxylase promoter (TH) (see, e.g., Oh et al. (2009) Gene Ther 16:437; Sasaoka et al. (1992) Mol. Brain Res. 16:274; Boundy et al. (1998) J. Neurosci. 18:9989; and Kaneda et al. (1991) Neuron 6:583-594); a GnRH promoter (see, e.g., Radovick et al. (1991) Proc. Natl. Acad. Sci. USA 88:3402-3406); an L7 promoter (see, e.g., Oberdick et al. (1990) Science 248:223-226); a DNMT promoter (see, e.g., Bartge et al. (1988) Proc. Natl. Acad. Sci. USA 85:3648-3652); an enkephalin promoter (see, e.g., Comb et al. (1988) EMBO J. 17:3793-3805); a myelin basic protein (MBP) promoter; a Ca2+-calmodulin-dependent protein kinase 11-alpha (CamKIIα) promoter (see, e.g., Mayford et al. (1996) Proc. Natl. Acad. Sci. USA 93:13250; and Casanova et al. (2001) Genesis 31:37); a CMV enhancer/platelet-derived growth factor-β promoter (see, e.g., Liu et al. (2004) Gene Therapy 11:52-60); and the like.

[0370] Adipocyte-specific spatially restricted promoters include, but are not limited to, the aP2 gene promoter/enhancer, e.g., a region from −5.4 kb to +21 bp of a human aP2 gene (see, e.g., Tozzo et al. (1997) Endocrinol. 138:1604; Ross et al. (1990) Proc. Natl. Acad. Sci. USA 87:9590; and Pavjani et al. (2005) Nat. Med. 11:797); a glucose transporter-4 (GLUT4) promoter (see, e.g., Knight et al. (2003) Proc. Natl. Acad. Sci. USA 100:14725); a fatty acid translocase (FAT/CD36) promoter (see, e.g., Kuriki et al. (2002) Biol. Pharm. Bull. 25:1476; and Sato et al. (2002) J. Biol. Chem. 277:15703); a stearoyl-CoA desaturase-1 (SCD1) promoter (Tabor et al. (1999) J. Biol. Chem. 274:20603); a leptin promoter (see, e.g., Mason et al. (1998) Endocrinol. 139:1013; and Chen et al. (1999) Biochem. Biophys. Res. Comm. 262:187); an adiponectin promoter (see, e.g., Kita et al. (2005) Biochem. Biophys. Res. Comm. 331:484; and Chakrabarti (2010) Endocrinol. 151:2408); an adipsin promoter (see, e.g., Platt et al. (1989) Proc. Natl. Acad. Sci. USA 86:7490); a resistin promoter (see, e.g., Seo et al. (2003) Molec. Endocrinol. 17:1522); and the like.

[0371] Cardiomyocyte-specific spatially restricted promoters include, but are not limited to, control sequences derived from the following genes: myosin light chain-2, α-myosin heavy chain, AE3, cardiac troponin C, cardiac actin, and the like. Franz et al. (1997) Cardiovasc. Res. 35:560-566; Robbins et al. (1995) Ann. N.Y. Acad. Sci. 752:492-505; Linn et al. (1995) Circ. Res. 76:584-591; Parmacek et al. (1994) Mol. Cell. Biol. 14:1870-1885; Hunter et al. (1993) Hypertension 22:608-617; and Sartorelli et al. (1992) Proc. Natl. Acad. Sci. USA 89:4047-4051.

[0372] Smooth muscle-specific spatially restricted promoters include, but are not limited to, an SM22α promoter (see, e.g., Akyurek et al. (2000) Mol. Med. 6:983; and U.S. Pat. No. 7,169,874); a smoothelin promoter (see, e.g., WO 2001/018048); an α-smooth muscle actin promoter; and the like. For example, a 0.4 kb region of the SM22α promoter, within which lie two CArG elements, has been shown to mediate vascular smooth muscle cell-specific expression (see, e.g., Kim, et al. (1997) Mol. Cell. Biol. 17, 2266-2278; Li, et al., (1996) J. Cell Biol. 132, 849-859; and Moessler, et al. (1996) Development 122, 2415-2425).

[0373] Photoreceptor-specific spatially restricted promoters include, but are not limited to, a rhodopsin promoter; a rhodopsin kinase promoter (Young et al. (2003) Ophthalmol. Vis. Sci. 44:4076); a beta phosphodiesterase gene promoter (Nicoud et al. (2007) J. Gene Med. 9:1015); a retinitis pigmentosa gene promoter (Nicoud et al. (2007) supra); an interphotoreceptor retinoid-binding protein (IRBP) gene enhancer (Nicoud et al. (2007) supra); an IRBP gene promoter (Yokoyama et al. (1992) Exp Eye Res. 55:225); and the like.

### Nonlimiting Exemplary Cell-Specific Promoters

[0374] Cell-specific promoters known in the art may be used to direct expression of a gene modifying protein, e.g., as described herein. Nonlimiting exemplary mammalian cell-specific promoters have been characterized and used in mice expressing Cre recombinase in a cell-specific manner. Certain nonlimiting exemplary mammalian cell-specific promoters are listed in Table 1 of U.S. Pat. No. 9,845,481, incorporated herein by reference.

[0375] In some embodiments, a cell-specific promoter is a promoter that is active in plants. Many exemplary cell-specific plant promoters are known in the art. See, e.g., U.S. Pat. Nos. 5,097,025; 5,783,393; 5,880,330; 5,981,727; 7,557,264; 6,291,666; 7,132,526; and 7,323,622; and U.S. Publication Nos. 2010/0269226; 2007/0180580; 2005/0034192; and 2005/0086712, which are incorporated by reference herein in their entireties for any purpose.

[0376] In some embodiments, a vector as described herein comprises an expression cassette. The term “expression cassette”, as used herein, refers to a nucleic acid construct comprising nucleic acid elements sufficient for the expression of the nucleic acid molecule of the instant invention. Typically, an expression cassette comprises the nucleic acid molecule of the instant invention operatively linked to a promoter sequence. The term“operatively linked” refers to the association of two or more nucleic acid fragments on a single nucleic acid fragment so that the function of one is affected by the other. For example, a promoter is operatively linked with a coding sequence when it is capable of affecting the expression of that coding sequence (e.g., the coding sequence is under the transcriptional control of the promoter). Encoding sequences can be operatively linked to regulatory sequences in sense or antisense orientation. In certain embodiments, the promoter is a heterologous promoter. The term“heterologous promoter”, as used herein, refers to a promoter that is not found to be operatively linked to a given encoding sequence in nature. In certain embodiments, an expression cassette may comprise additional elements, for example, an intron, an enhancer, a polyadenylation site, a woodchuck response element (WRE), and/or other elements known to affect expression levels of the encoding sequence A“promoter” typically controls the expression of a coding sequence or functional RNA. In certain embodiments, a promoter sequence comprises proximal and more distal upstream elements and can further comprise an enhancer element. An “enhancer” can typically stimulate promoter activity and may be an innate element of the promoter or a heterologous element inserted to enhance the level or tissue-specificity of a promoter. In certain embodiments, the promoter is derived in its entirety from a native gene. In certain embodiments, the promoter is composed of different elements derived from different naturally occurring promoters. In certain embodiments, the promoter comprises a synthetic nucleotide sequence. It will be understood by those skilled in the art that different promoters will direct the expression of a gene in different tissues or cell types, or at different stages of development, or in response to different environmental conditions or to the presence or the absence of a drug or transcriptional co-factor. Ubiquitous, cell-type-specific, tissue-specific, developmental stage-specific, and conditional promoters, for example, drug-responsive promoters (e.g., tetracycline-responsive promoters) are well known to those of skill in the art. Examples of promoter include, but are not limited to, the phosphoglycerate kinase (PKG) promoter, CAG (composite of the CMV enhancer the chicken beta actin promoter (CBA) and the rabbit beta globin intron.), NSE (neuronal specific enolase), synapsin or NeuN promoters, the SV40 early promoter, mouse mammary tumor virus LTR promoter; adenovirus major late promoter (Ad MLP); a herpes simplex virus (HSV) promoter, a cytomegalovirus (CMV) promoter such as the CMV immediate early promoter region (CMVIE), SFFV promoter, rous sarcoma virus (RSV) promoter, synthetic promoters, hybrid promoters, and the like. Other promoters can be of human origin or from other species, including from mice. Common promoters include, e.g., the human cytomegalovirus (CMV) immediate early gene promoter, the SV40 early promoter, the Rous sarcoma virus long terminal repeat, [beta]-actin, rat insulin promoter, the phosphoglycerate kinase promoter, the human alpha-1 antitrypsin (hAAT) promoter, the transthyretin promoter, the TBG promoter and other liver-specific promoters, the desmin promoter and similar muscle-specific promoters, the EF1-alpha promoter, the CAG promoter and other constitutive promoters, hybrid promoters with multi-tissue specificity, promoters specific for neurons like synapsin and glyceraldehyde-3-phosphate dehydrogenase promoter, all of which are promoters well known and readily available to those of skill in the art, can be used to obtain high-level expression of the coding sequence of interest. In addition, sequences derived from non-viral genes, such as the murine metallothionein gene, will also find use herein. Such promoter sequences are commercially available from, e.g., Stratagene (San Diego, CA). Additional exemplary promoter sequences are described, for example, in WO2018213786A1 (incorporated by reference herein in its entirety).

[0377] In some embodiments, the apolipoprotein E enhancer (ApoE) or a functional fragment thereof is used, e.g., to drive expression in the liver. In some embodiments, two copies of the ApoE enhancer or a functional fragment thereof is used. In some embodiments, the ApoE enhancer or functional fragment thereof is used in combination with a promoter, e.g., the human alpha-1 antitrypsin (hAAT) promoter.

[0378] In some embodiments, the regulatory sequences impart tissue-specific gene expression capabilities. In some cases, the tissue-specific regulatory sequences bind tissue-specific transcription factors that induce transcription in a tissue specific manner. Various tissue-specific regulatory sequences (e.g., promoters, enhancers, etc.) are known in the art. Exemplary tissue-specific regulatory sequences include, but are not limited to, the following tissue-specific promoters: a liver-specific thyroxin binding globulin (TBG) promoter, a insulin promoter, a glucagon promoter, a somatostatin promoter, a pancreatic polypeptide (PPY) promoter, a synapsin-1 (Syn) promoter, a creatine kinase (MCK) promoter, a mammalian desmin (DES) promoter, a α-myosin heavy chain (a-MHC) promoter, or a cardiac Troponin T (cTnT) promoter. Other exemplary promoters include Beta-actin promoter, hepatitis B virus core promoter, Sandig et al., Gene Ther., 3:1002-9 (1996); alpha-fetoprotein (AFP) promoter, Arbuthnot et al., Hum. Gene Ther., 7:1503-14 (1996)), bone osteocalcin promoter (Stein et al., Mol. Biol. Rep., 24:185-96 (1997)); bone sialoprotein promoter (Chen et al., J. Bone Miner. Res., 11:654-64 (1996)), CD2 promoter (Hansal et al., J. Immunol., 161:1063-8 (1998); immunoglobulin heavy chain promoter; T cell receptor α-chain promoter, neuronal such as neuron-specific enolase (NSE) promoter (Andersen et al., Cell. Mol. Neurobiol., 13:503-15 (1993)), neurofilament light-chain gene promoter (Piccioli et al., Proc. Natl. Acad. Sci. USA, 88:5611-5 (1991)), and the neuron-specific vgf gene promoter (Piccioli et al., Neuron, 15:373-84 (1995)), and others. Additional exemplary promoter sequences are described, for example, in U.S. patent Ser. No. 10/300,146 (incorporated herein by reference in its entirety). In some embodiments, a tissue-specific regulatory element, e.g., a tissue-specific promoter, is selected from one known to be operably linked to a gene that is highly expressed in a given tissue, e.g., as measured by RNA-seq or protein expression data, or a combination thereof. Methods for analyzing tissue specificity by expression are taught in Fagerberg et al. Mol Cell Proteomics 13(2):397-406 (2014), which is incorporated herein by reference in its entirety.

[0379] In some embodiments, a vector described herein is a multicistronic expression construct. Multicistronic expression constructs include, for example, constructs harboring a first expression cassette, e.g. comprising a first promoter and a first encoding nucleic acid sequence, and a second expression cassette, e.g. comprising a second promoter and a second encoding nucleic acid sequence. Such multicistronic expression constructs may, in some instances, be particularly useful in the delivery of non-translated gene products, such as hairpin RNAs, together with a polypeptide, for example, a gene modifying polypeptide and gene modifying template. In some embodiments, multicistronic expression constructs may exhibit reduced expression levels of one or more of the included transgenes, for example, because of promoter interference or the presence of incompatible nucleic acid elements in close proximity. If a multicistronic expression construct is part of a viral vector, the presence of a self-complementary nucleic acid sequence may, in some instances, interfere with the formation of structures necessary for viral reproduction or packaging.

[0380] In some embodiments, the sequence encodes an RNA with a hairpin. In some embodiments, the hairpin RNA is a guide RNA, a template RNA, shRNA, or a microRNA. In some embodiments, the first promoter is an RNA polymerase I promoter. In some embodiments, the first promoter is an RNA polymerase II promoter. In some embodiments, the second promoter is an RNA polymerase III promoter. In some embodiments, the second promoter is a U6 or H1 promoter. In some embodiments, the nucleic acid construct comprises the structure of AAV construct B1 or B2.

[0381] Without wishing to be bound by theory, multicistronic expression constructs may not achieve optimal expression levels as compared to expression systems containing only one cistron. One of the suggested causes of lower expression levels achieved with multicistronic expression constructs comprising two ore more promoter elements is the phenomenon of promoter interference (see, e.g., Curtin J A, Dane A P, Swanson A, Alexander I E, Ginn S L. Bidirectional promoter interference between two widely used internal heterologous promoters in a late-generation lentiviral construct. Gene Ther. 2008 March; 15(5):384-90; and Martin-Duque P, Jezzard S, Kaftansis L, Vassaux G. Direct comparison of the insulating properties of two genetic elements in an adenoviral vector containing two different expression cassettes. Hum Gene Ther. 2004 October; 15(10):995-1002; both references incorporated herein by reference for disclosure of promoter interference phenomenon). In some embodiments, the problem of promoter interference may be overcome, e.g., by producing multicistronic expression constructs comprising only one promoter driving transcription of multiple encoding nucleic acid sequences separated by internal ribosomal entry sites, or by separating cistrons comprising their own promoter with transcriptional insulator elements. In some embodiments, single-promoter driven expression of multiple cistrons may result in uneven expression levels of the cistrons. In some embodiments, a promoter cannot efficiently be isolated and isolation elements may not be compatible with some gene transfer vectors, for example, some retroviral vectors.

### MicroRNAs

[0382] miRNAs and other small interfering nucleic acids generally regulate gene expression via target RNA transcript cleavage/degradation or translational repression of the target messenger RNA (mRNA). miRNAs may, in some instances, be natively expressed, typically as final 19-25 non-translated RNA products. miRNAs generally exhibit their activity through sequence-specific interactions with the 3′ untranslated regions (UTR) of target mRNAs. These endogenously expressed miRNAs may form hairpin precursors that are subsequently processed into an miRNA duplex, and further into a mature single stranded miRNA molecule. This mature miRNA generally guides a multiprotein complex, miRISC, which identifies target 3′ UTR regions of target mRNAs based upon their complementarity to the mature miRNA. Useful transgene products may include, for example, miRNAs or miRNA binding sites that regulate the expression of a linked polypeptide. A non-limiting list of miRNA genes; the products of these genes and their homologues are useful as transgenes or as targets for small interfering nucleic acids (e.g., miRNA sponges, antisense oligonucleotides), e.g., in methods such as those listed in U.S. Ser. No. 10/300,146, 22:25-25:48, incorporated by reference. In some embodiments, one or more binding sites for one or more of the foregoing miRNAs are incorporated in a transgene, e.g., a transgene delivered by a rAAV vector, e.g., to inhibit the expression of the transgene in one or more tissues of an animal harboring the transgene. In some embodiments, a binding site may be selected to control the expression of a transgene in a tissue specific manner. For example, binding sites for the liver-specific miR-122 may be incorporated into a transgene to inhibit expression of that transgene in the liver. Additional exemplary miRNA sequences are described, for example, in U.S. patent Ser. No. 10/300,146 (incorporated herein by reference in its entirety). For liver-specific gene modifying, however, overexpression of miR-122 may be utilized instead of using binding sites to effect miR-122-specific degradation. This miRNA is positively associated with hepatic differentiation and maturation, as well as enhanced expression of liver specific genes. Thus, in some embodiments, the coding sequence for miR-122 may be added to a component of a gene modifying system to enhance a liver-directed therapy.

[0383] A miR inhibitor or miRNA inhibitor is generally an agent that blocks miRNA expression and/or processing. Examples of such agents include, but are not limited to, microRNA antagonists, microRNA specific antisense, microRNA sponges, and microRNA oligonucleotides (double-stranded, hairpin, short oligonucleotides) that inhibit miRNA interaction with a Drosha complex. MicroRNA inhibitors, e.g., miRNA sponges, can be expressed in cells from transgenes (e.g., as described in Ebert, M. S. Nature Methods, Epub Aug. 12, 2007; incorporated by reference herein in its entirety). In some embodiments, microRNA sponges, or other miR inhibitors, are used with the AAVs. microRNA sponges generally specifically inhibit miRNAs through a complementary heptameric seed sequence. In some embodiments, an entire family of miRNAs can be silenced using a single sponge sequence. Other methods for silencing miRNA function (derepression of miRNA targets) in cells will be apparent to one of ordinary skill in the art.

[0384] In some embodiments, a miRNA as described herein comprises a sequence listed in Table 4 of PCT Publication No. WO2020014209, incorporated herein by reference. Also incorporated herein by reference are the listing of exemplary miRNA sequences from WO2020014209.

[0385] In some embodiments, it is advantageous to silence one or more components of a gene modifying system (e.g., mRNA encoding a gene modifying polypeptide, a gene modifying Template RNA, or a heterologous object sequence expressed from the genome after successful gene modifying) in a portion of cells. In some embodiments, it is advantageous to restrict expression of a component of a gene modifying system to select cell types within a tissue of interest.

[0386] For example, it is known that in a given tissue, e.g., liver, macrophages and immune cells, e.g., Kupffer cells in the liver, may engage in uptake of a delivery vehicle for one or more components of a gene modifying system. In some embodiments, at least one binding site for at least one miRNA highly expressed in macrophages and immune cells, e.g., Kupffer cells, is included in at least one component of a gene modifying system, e.g., nucleic acid encoding a gene modifying polypeptide or a transgene. In some embodiments, a miRNA that targets the one or more binding sites is listed in a table referenced herein, e.g., miR-142, e.g., mature miRNA hsa-miR-142-5p or hsa-miR-142-3p.

[0387] In some embodiments, there may be a benefit to decreasing gene modifying polypeptide levels and/or gene modifying activity in cells in which gene modifying polypeptide expression or overexpression of a transgene may have a toxic effect. For example, it has been shown that delivery of a transgene overexpression cassette to dorsal root ganglion neurons may result in toxicity of a gene therapy (see Hordeaux et al Sci Transl Med 12(569):eaba9188 (2020), incorporated herein by reference in its entirety). In some embodiments, at least one miRNA binding site may be incorporated into a nucleic acid component of a gene modifying system to reduce expression of a system component in a neuron, e.g., a dorsal root ganglion neuron. In some embodiments, the at least one miRNA binding site incorporated into a nucleic acid component of a gene modifying system to reduce expression of a system component in a neuron is a binding site of miR-182, e.g., mature miRNA hsa-miR-182-5p or hsa-miR-182-3p. In some embodiments, the at least one miRNA binding site incorporated into a nucleic acid component of a gene modifying system to reduce expression of a system component in a neuron is a binding site of miR-183, e.g., mature miRNA hsa-miR-183-5p or hsa-miR-183-3p. In some embodiments, combinations of miRNA binding sites may be used to enhance the restriction of expression of one or more components of a gene modifying system to a tissue or cell type of interest.

[0388] Table A5 below provides exemplary miRNAs and corresponding expressing cells, e.g., a miRNA for which one can, in some embodiments, incorporate binding sites (complementary sequences) in the transgene or polypeptide nucleic acid, e.g., to decrease expression in that off-target cell.

TABLE A5
Exemplary miRNA from off-target cells and tissues

| Silenced | miRNA | Mature | | SEQ |
|---|---|---|---|---|
| cell type | name | miRNA | miRNA sequence | ID NO: |
| Kupffer cells | miR-142 | hsa-miR-142-5p | cauaaaguagaaagcacuacu | 15420 |
| Kupffer cells | miR-142 | hsa-miR-142-3p | uguaguguuuccuacuuuaugga | 15421 |
| Dorsal root | miR-182 | hsa-miR-182-5p | uuuggcaaugguagaacucacacu | 15422 |
| ganglion neurons | | | | |
| Dorsal root | miR-182 | hsa-miR-182-3p | ugguucuagacuugccaacua | 15423 |
| ganglion neurons | | | | |
| Dorsal root | miR-183 | hsa-miR-183-5p | uauggcacugguagaauucacu | 15424 |
| ganglion neurons | | | | |
| Table XDorsal | miR-183 | hsa-miR-183-3p | gugaauuaccgaagggccauaa | 15425 |
| root ganglion | | | | |
| neurons | | | | |
| Hepatocytes | miR-122 | hsa-miR-122-5p | uggagugugacaaugguguuug | 15426 |
| Hepatocytes | miR-122 | hsa-miR-122-3p | aacgccauuaucacacuaaaua | 15427 |

[0389] In some embodiments, a gene modifying system is capable of producing a substitution into the target site of at least 1, 2, 3, 4, 5, 6, 7, 8, 9, 10, 15, 20, 25, 30, 35, 40, 45, 50, 60, 70, 80, 90, or 100 or more nucleotides. In some embodiments, the substitution is a transition mutation. In some embodiments, the substitution is a transversion mutation. In some embodiments, the substitution converts an adenine to a thymine, an adenine to a guanine, an adenine to a cytosine, a guanine to a thymine, a guanine to a cytosine, a guanine to an adenine, a thymine to a cytosine, a thymine to an adenine, a thymine to a guanine, a cytosine to an adenine, a cytosine to a guanine, or a cytosine to a thymine.

[0390] In some embodiments, a gene modifying system is capable of producing an insertion into the target site of at least 45, 50, 55, 60, 65, 70, 75, 80, 85, 90, 95, or 100 nucleotides (and optionally no more than 500, 400, 300, 200, or 100 nucleotides). In some embodiments, a gene modifying system is capable of producing an insertion into the target site of at least 1, 2, 3, 4, 5, 6, 7, 8, 9, 10, 15, 20, 25, 30, 35, 40, 45, 50, 55, 60, 65, 70, 75, 80, 85, 90, 95, or 100 nucleotides (and optionally no more than 500, 400, 300, 200, or 100 nucleotides). In some embodiments, a gene modifying system is capable of producing an insertion into the target site of at least 0.2, 0.3, 0.4, 0.5, 0.6, 0.7, 0.8, 0.9, 1, 1.5, 2, 2.5, 3, 3.5, 4, 4.5, 5, 5.5, 6, 6.5, 7, 7.5, 8, 8.5, 9, 9.5 or 10 kilobases (and optionally no more than 1, 5, 10, or 20 kilobases). In some embodiments, a gene modifying system is capable of producing a deletion of at least 81, 85, 90, 95, 100, 110, 120, 130, 140, 150, 160, 170, 180, 190, or 200 nucleotides (and optionally no more than 500, 400, 300, or 200 nucleotides). In some embodiments, a gene modifying system is capable of producing a deletion of at least 81, 85, 90, 95, 100, 110, 120, 130, 140, 150, 160, 170, 180, 190, or 200 nucleotides (and optionally no more than 500, 400, 300, or 200 nucleotides). In some embodiments, a gene modifying system is capable of producing a deletion of at least 1, 2, 3, 4, 5, 6, 7, 8, 9, 10, 15, 20, 25, 30, 35, 40, 45, 50, 55, 60, 65, 70, 75, 80, 85, 90, 95, 100, 110, 120, 130, 140, 150, 160, 170, 180, 190, or 200 nucleotides (and optionally no more than 500, 400, 300, or 200 nucleotides). In some embodiments, a gene modifying system is capable of producing a deletion of at least 0.2, 0.3, 0.4, 0.5, 0.6, 0.7, 0.8, 0.9, 1, 1.5, 2, 2.5, 3, 3.5, 4, 4.5, 5, 5.5, 6, 6.5, 7, 7.5, 8, 8.5, 9, 9.5 or 10 kilobases (and optionally no more than 1, 5, 10, or 20 kilobases).

[0391] In some embodiments, an insertion, deletion, substitution, or combination thereof, increases or decreases expression (e.g. transcription or translation) of a gene. In some embodiments, an insertion, deletion, substitution, or combination thereof, increases or decreases expression (e.g. transcription or translation) of a gene by altering, adding, or deleting sequences in a promoter or enhancer, e.g. sequences that bind transcription factors. In some embodiments, an insertion, deletion, substitution, or combination thereof alters translation of a gene (e.g. alters an amino acid sequence), inserts or deletes a start or stop codon, alters or fixes the translation frame of a gene. In some embodiments, an insertion, deletion, substitution, or combination thereof alters splicing of a gene, e.g. by inserting, deleting, or altering a splice acceptor or donor site. In some embodiments, an insertion, deletion, substitution, or combination thereof alters transcript or protein half-life. In some embodiments, an insertion, deletion, substitution, or combination thereof alters protein localization in the cell (e.g. from the cytoplasm to a mitochondria, from the cytoplasm into the extracellular space (e.g. adds a secretion tag)). In some embodiments, an insertion, deletion, substitution, or combination thereof alters (e.g. improves) protein folding (e.g. to prevent accumulation of misfolded proteins). In some embodiments, an insertion, deletion, substitution, or combination thereof, alters, increases, decreases the activity of a gene, e.g. a protein encoded by the gene.

[0392] In some embodiments, the gene modifying polypeptide results in insertion of the heterologous object sequence (e.g., the GFP gene) into the target locus (e.g., rDNA) at an average copy number of at least 0.01, 0.025, 0.05, 0.075, 0.1, 0.15, 0.2, 0.25, 0.3, 0.4, 0.5, 0.75, 1, 1.25, 1.5, 1.75, 2, 2.5, 3, 4, or 5 copies per genome. In some embodiments, a cell described herein (e.g., a cell comprising a heterologous sequence at a target insertion site) comprises the heterologous object sequence at an average copy number of at least 0.01, 0.025, 0.05, 0.075, 0.1, 0.15, 0.2, 0.25, 0.3, 0.4, 0.5, 0.75, 1, 1.25, 1.5, 1.75, 2, 2.5, 3, 4, or 5 copies per genome.

[0393] In some embodiments, a gene modifying system causes integration of a sequence in a target DNA with relatively few truncation events at the terminus. For instance, in some embodiments, a gene modifying protein results in about 25-100%, 50-100%, 60-100%, 70-100%, 75-95%, 80%-90%, or 86.17% of integrants into the target site being non-truncated, as measured by an assay described herein, e.g., an assay of Example 6 and FIG. 8 of PCT Application No. PCT/US2019/048607, incorporated herein by reference in its entirety. In some embodiments, a gene modifying protein results in at least about 30%, 40%, 50%, 60%, 70%, 80%, or 90% of integrants into the target site being non-truncated, as measured by an assay described herein. In some embodiments, an integrant is classified as truncated versus non-truncated using an assay comprising amplification with a forward primer situated 565 bp from the end of the element (e.g., a wild-type retrotransposon sequence) and a reverse primer situated in the genomic DNA of the target insertion site, e.g., rDNA. In some embodiments, the number of full-length integrants in the target insertion site is greater than the number of integrants truncated by 300-565 nucleotides in the target insertion site, e.g., the number of full-length integrants is at least 1.1×, 1.2×, 1.5×, 2×, 3×, 4×, 5×, 6×, 7×, 8×, 9×, or 10× the number of the truncated integrants, or the number of full-length integrants is at least 1.1×-10×, 2×-10×, 3×-10×, or 5×-10× the number of the truncated integrants.

[0394] In some embodiments, a system or method described herein results in insertion of the heterologous object sequence only at one target site in the genome of the target cell. Insertion can be measured, e.g., using a threshold of above 1%, 1.5%, 2%, 2.5%, 3%, 3.5%, 4%, 4.5%, 5%, e.g., as described in Example 8 of PCT Application No. PCT/US2019/048607, incorporated herein by reference in its entirety. In some embodiments, a system or method described herein results in insertion of the heterologous object sequence wherein less than 1%, 1.5%, 2%, 2.5%, 3%, 3.5%, 4%, 4.5%, 5%, 10%, 20%, 30%, 40%, or 50% of insertions are at a site other than the target site, e.g., using an assay described herein, e.g., an assay of Example 8 of PCT Application No. PCT/US2019/048607, incorporated herein by reference in its entirety.

[0395] In some embodiments, a system or method described herein results in “scarless” insertion of the heterologous object sequence, while in some embodiments, the target site can show deletions or duplications of endogenous DNA as a result of insertion of the heterologous sequence. The mechanisms of different retrotransposons could result in different patterns of duplications or deletions in the host genome occurring during retrotransposition at the target site. In some embodiments, the system results in a scarless insertion, with no duplications or deletions in the surrounding genomic DNA. In some embodiments, the system results in a deletion of less than 1, 2, 3, 4, 5, 10, 50, or 100 bp of genomic DNA upstream of the insertion. In some embodiments, the system results in a deletion of less than 1, 2, 3, 4, 5, 10, 50, or 100 bp of genomic DNA downstream of the insertion. In some embodiments, the system results in a duplication of less than 1, 2, 3, 4, 5, 10, 50, or 100 bp of genomic DNA upstream of the insertion. In some embodiments, the system results in a duplication of less than 1, 2, 3, 4, 5, 10, 50, or 100 bp of genomic DNA downstream of the insertion.

[0396] In some embodiments, a gene modifying system described herein, or a DNA-binding domain thereof, binds to its target site specifically, e.g., as measured using an assay of Example 21 of PCT Application No. PCT/US2019/048607, incorporated herein by reference in its entirety. In some embodiments, the gene modifying polypeptide or DNA-binding domain thereof binds to its target site more strongly than to any other binding site in the human genome. For example, in some embodiments, in an assay of Example 21 of PCT Application No. PCT/US2019/048607, incorporated herein by reference in its entirety, the target site represents more than 50%, 60%, 70%, 80%, 90%, or 95% of binding events of the gene modifying polypeptide or DNA-binding domain thereof to human genomic DNA. In some embodiments, the DNA binding domain of the gene modifying polypeptide is heterologous to the remainder of the gene modifying polypeptide, e.g., such that the gene modifying polypeptide targets a different target site that the endogenous DNA binding domain associated with the remainder of the gene modifying polypeptide.

### Genetically Engineered, e.g., Dimerized Gene Modifying Polypeptides

[0397] Some non-LTR retrotransposons utilize two subunits to complete retrotransposition (Christensen et al PNAS 2006). In some embodiments, a retrotransposase described herein comprises two connected subunits as a single polypeptide. For instance, two wild-type retrotransposases could be joined with a linker to form a covalently “dimerized” protein. In some embodiments, the nucleic acid coding for the retrotransposase codes for two retrotransposase subunits to be expressed as a single polypeptide. In some embodiments, the subunits are connected by a peptide linker, such as has been described herein in the section entitled “Linker” and, e.g., in Chen et al Adv Drug Deliv Rev 2013. In some embodiments, the two subunits in the polypeptide are connected by a rigid linker. In some embodiments, the rigid linker consists of the motif (EAAAK)ₙ (SEQ ID NO: 1534). In other embodiments, the two subunits in the polypeptide are connected by a flexible linker. In some embodiments, the flexible linker consists of the motif (Gly)ₙ. In some embodiments, the flexible linker consists of the motif (GGGGS)ₙ (SEQ ID NO: 1535). In some embodiments, the rigid or flexible linker consists of 1, 2, 3, 4, 5, 10, 15, or more amino acids in length to enable retrotransposition. In some embodiments, the linker consists of a combination of rigid and flexible linker motifs.

[0398] Based on mechanism, not all functions are required from both retrotransposase subunits. In some embodiments, the fusion protein may consist of a fully functional subunit and a second subunit lacking one or more functional domains. In some embodiments, one subunit may lack reverse transcriptase functionality. In some embodiments, one subunit may lack the reverse transcriptase domain. In some embodiments, one subunit may possess only endonuclease activity. In some embodiments, one subunit may possess only an endonuclease domain. In some embodiments, the two subunits comprising the single polypeptide may provide complimentary functions.

[0399] In some embodiments, one subunit may lack endonuclease functionality. In some embodiments, one subunit may lack the endonuclease domain. In some embodiments, one subunit may possess only reverse transcriptase activity. In some embodiments, one subunit may possess only a reverse transcriptase domain. In some embodiments, one subunit may possess only DNA-dependent DNA synthesis functionality.

### Evolved Variants of Gene Modifying Polypeptides

[0400] In some embodiments, the invention provides evolved variants of gene modifying polypeptides. Evolved variants can, in some embodiments, be produced by mutagenizing a reference gene modifying polypeptide, or one of the fragments or domains comprised therein. In some embodiments, one or more of the domains (e.g., the reverse transcriptase, DNA binding (including, for example, sequence-guided DNA binding elements), RNA-binding, or endonuclease domain) is evolved. One or more of such evolved variant domains can, in some embodiments, be evolved alone or together with other domains. An evolved variant domain or domains may, in some embodiments, be combined with unevolved cognate component(s) or evolved variants of the cognate component(s), e.g., which may have been evolved in either a parallel or serial manner.

[0401] In some embodiments, the process of mutagenizing a reference gene modifying polypeptide, or fragment or domain thereof, comprises mutagenizing the reference gene modifying polypeptide or fragment or domain thereof. In embodiments, the mutagenesis comprises a continuous evolution method (e.g., PACE) or non-continuous evolution method (e.g., PANCE), e.g., as described herein. In some embodiments, the evolved gene modifying polypeptide, or a fragment or domain thereof, comprises one or more amino acid variations introduced into its amino acid sequence relative to the amino acid sequence of the reference gene modifying polypeptide, or fragment or domain thereof. In embodiments, amino acid sequence variations may include one or more mutated residues (e.g., conservative substitutions, non-conservative substitutions, or a combination thereof) within the amino acid sequence of a reference gene modifying polypeptide, e.g., as a result of a change in the nucleotide sequence encoding the gene modifying polypeptide that results in, e.g., a change in the codon at any particular position in the coding sequence, the deletion of one or more amino acids (e.g., a truncated protein), the insertion of one or more amino acids, or any combination of the foregoing. The evolved variant gene modifying polypeptide may include variants in one or more components or domains of the gene modifying polypeptide (e.g., variants introduced into a reverse transcriptase domain, endonuclease domain, DNA binding domain, RNA binding domain, or combinations thereof).

[0402] In some aspects, the invention provides gene modifying polypeptides, systems, kits, and methods using or comprising an evolved variant of a gene modifying polypeptide, e.g., employs an evolved variant of a gene modifying polypeptide or a gene modifying polypeptide produced or producible by PACE or PANCE. In embodiments, the unevolved reference gene modifying polypeptide is a gene modifying polypeptide as disclosed herein.

[0403] The term “phage-assisted continuous evolution (PACE),” as used herein, generally refers to continuous evolution that employs phage as viral vectors. Examples of PACE technology have been described, for example, in International PCT Application No. PCT/US 2009/056194, filed Sep. 8, 2009, published as WO 2010/028347 on Mar. 11, 2010; International PCT Application, PCT/US2011/066747, filed Dec. 22, 2011, published as WO 2012/088381 on Jun. 28, 2012; U.S. Pat. No. 9,023,594, issued May 5, 2015; U.S. Pat. No. 9,771,574, issued Sep. 26, 2017; U.S. Pat. No. 9,394,537, issued Jul. 19, 2016; International PCT Application, PCT/US2015/012022, filed Jan. 20, 2015, published as WO 2015/134121 on Sep. 11, 2015; U.S. Pat. No. 10,179,911, issued Jan. 15, 2019; and International PCT Application, PCT/US2016/027795, filed Apr. 15, 2016, published as WO 2016/168631 on Oct. 20, 2016, the entire contents of each of which are incorporated herein by reference.

[0404] The term “phage-assisted non-continuous evolution (PANCE),” as used herein, generally refers to non-continuous evolution that employs phage as viral vectors. Examples of PANCE technology have been described, for example, in Suzuki T. et al, Crystal structures reveal an elusive functional domain of pyrrolysyl-tRNA synthetase, Nat Chem Biol. 13(12): 1261-1266 (2017), incorporated herein by reference in its entirety. Briefly, PANCE is a technique for rapid in vivo directed evolution using serial flask transfers of evolving selection phage (SP), which contain a gene of interest to be evolved, across fresh host cells (e.g., E. coli cells). Genes inside the host cell may be held constant while genes contained in the SP continuously evolve. Following phage growth, an aliquot of infected cells may be used to transfect a subsequent flask containing host E. coli. This process can be repeated and/or continued until the desired phenotype is evolved, e.g., for as many transfers as desired.

[0405] Methods of applying PACE and PANCE to gene modifying polypeptide may be readily appreciated by the skilled artisan by reference to, inter alia, the foregoing references. Additional exemplary methods for directing continuous evolution of genome-modifying proteins or systems, e.g., in a population of host cells, e.g., using phage particles, can be applied to generate evolved variants of gene modifying polypeptide, or fragments or subdomains thereof. Non-limiting examples of such methods are described in International PCT Application, PCT/US2009/056194, filed Sep. 8, 2009, published as WO 2010/028347 on Mar. 11, 2010; International PCT Application, PCT/US2011/066747, filed Dec. 22, 2011, published as WO 2012/088381 on Jun. 28, 2012; U.S. Pat. No. 9,023,594, issued May 5, 2015; U.S. Pat. No. 9,771,574, issued Sep. 26, 2017; U.S. Pat. No. 9,394,537, issued Jul. 19, 2016; International PCT Application, PCT/US2015/012022, filed Jan. 20, 2015, published as WO 2015/134121 on Sep. 11, 2015; U.S. Pat. No. 10,179,911, issued Jan. 15, 2019; International Application No. PCT/US2019/37216, filed Jun. 14, 2019, International Patent Publication WO 2019/023680, published Jan. 31, 2019, International PCT Application, PCT/US2016/027795, filed Apr. 15, 2016, published as WO 2016/168631 on Oct. 20, 2016, and International Patent Publication No. PCT/US2019/47996, filed Aug. 23, 2019, each of which is incorporated herein by reference in its entirety.

[0406] In some non-limiting illustrative embodiments, a method of evolution of a evolved variant gene modifying polypeptide, of a fragment or domain thereof, comprises: (a) contacting a population of host cells with a population of viral vectors comprising the gene of interest (the starting gene modifying polypeptide or fragment or domain thereof), wherein: (1) the host cell is amenable to infection by the viral vector; (2) the host cell expresses viral genes required for the generation of viral particles; (3) the expression of at least one viral gene required for the production of an infectious viral particle is dependent on a function of the gene of interest; and/or (4) the viral vector allows for expression of the protein in the host cell, and can be replicated and packaged into a viral particle by the host cell. In some embodiments, the method comprises (b) contacting the host cells with a mutagen, using host cells with mutations that elevate mutation rate (e.g., either by carrying a mutation plasmid or some genome modification—e.g., proofing-impaired DNA polymerase, SOS genes, such as UmuC, UmuD′, and/or RecA, which mutations, if plasmid-bound, may be under control of an inducible promoter), or a combination thereof. In some embodiments, the method comprises (c) incubating the population of host cells under conditions allowing for viral replication and the production of viral particles, wherein host cells are removed from the host cell population, and fresh, uninfected host cells are introduced into the population of host cells, thus replenishing the population of host cells and creating a flow of host cells. In some embodiments, the cells are incubated under conditions allowing for the gene of interest to acquire a mutation. In some embodiments, the method further comprises (d) isolating a mutated version of the viral vector, encoding an evolved gene product (e.g., an evolved variant gene modifying polypeptide, or fragment or domain thereof), from the population of host cells.

[0407] The skilled artisan will appreciate a variety of features employable within the above-described framework. For example, in some embodiments, the viral vector or the phage is a filamentous phage, for example, an M13 phage, e.g., an M13 selection phage. In certain embodiments, the gene required for the production of infectious viral particles is the M13 gene III (gIII). In embodiments, the phage may lack a functional gIII, but otherwise comprise gI, gII, gIV, gV, gVI, gVII, gVIII, gIX, and a gX. In some embodiments, the generation of infectious VSV particles involves the envelope protein VSV-G. Various embodiments can use different retroviral vectors, for example, Murine Leukemia Virus vectors, or Lentiviral vectors. In embodiments, the retroviral vectors can efficiently be packaged with VSV-G envelope protein, e.g., as a substitute for the native envelope protein of the virus.

[0408] In some embodiments, host cells are incubated according to a suitable number of viral life cycles, e.g., at least 10, at least 20, at least 30, at least 40, at least 50, at least 100, at least 200, at least 300, at least 400, at least, 500, at least 600, at least 700, at least 800, at least 900, at least 1000, at least 1250, at least 1500, at least 1750, at least 2000, at least 2500, at least 3000, at least 4000, at least 5000, at least 7500, at least 10000, or more consecutive viral life cycles, which in on illustrative and non-limiting examples of M13 phage is 10-20 minutes per virus life cycle. Similarly, conditions can be modulated to adjust the time a host cell remains in a population of host cells, e.g., about 10, about 11, about 12, about 13, about 14, about 15, about 16, about 17, about 18, about 19, about 20, about 21, about 22, about 23, about 24, about 25, about 30, about 35, about 40, about 45, about 50, about 55, about 60, about 70, about 80, about 90, about 100, about 120, about 150, or about 180 minutes. Host cell populations can be controlled in part by density of the host cells, or, in some embodiments, the host cell density in an inflow, e.g., 10³ cells/ml, about 10⁴ cells/ml, about 10⁵ cells/ml, about 5-10⁵ cells/ml, about 10⁶ cells/ml, about 5-10⁶ cells/ml, about 10⁷ cells/ml, about 5-10⁷ cells/ml, about 10⁸ cells/ml, about 5-10⁸ cells/ml, about 10⁹ cells/ml, about 5·10⁹ cells/ml, about 10¹⁰ cells/ml, or about 5·10¹⁰ cells/ml.

### Template RNA Component of Gene Modifying System

[0409] The gene modifying systems described herein can transcribe an RNA sequence template into host target DNA sites by target-primed reverse transcription. By writing DNA sequence(s) via reverse transcription of the RNA sequence template directly into the host genome, the gene modifying system can insert an object sequence into a target genome without the need for exogenous DNA sequences to be introduced into the host cell (unlike, for example, CRISPR systems), as well as eliminate an exogenous DNA insertion step. Therefore, the gene modifying system provides a platform for the use of customized RNA sequence templates containing object sequences, e.g., sequences comprising heterologous gene coding and/or function information.

[0410] In some embodiments, the template RNA encodes a gene modifying protein in cis with a heterologous object sequence. Various cis constructs were described, for example, in Kuroki-Kami et al (2019) Mobile DNA 10.23 (incorporated by reference herein in its entirety), and can be used in combination with any of the embodiments described herein. For instance, in some embodiments, the template RNA comprises a heterologous object sequence, a sequence encoding a gene modifying protein (e.g., a protein comprising (i) a reverse transcriptase domain and (ii) an endonuclease domain, e.g., as described herein), a 5′ untranslated region, and a 3′ untranslated region. The components may be included in various orders. In some embodiments, the gene modifying protein and heterologous object sequence are encoded in different directions (sense vs. anti-sense), e.g., using an arrangement shown in FIG. 3A of Kuroki-Kami et al, Id. In some embodiments, the gene modifying protein and heterologous object sequence are encoded in the same direction. In some embodiments, the nucleic acid encoding the polypeptide and the template RNA or the nucleic acid encoding the template RNA are covalently linked, e.g., are part of a fusion nucleic acid, and/or are part of the same transcript. In some embodiments, the fusion nucleic acid comprises RNA or DNA.

[0411] The nucleic acid encoding the gene modifying polypeptide may, in some instances, be 5′ of the heterologous object sequence. For example, in some embodiments, the template RNA comprises, from 5′ to 3′, a 5′ untranslated region, a sense-encoded gene modifying polypeptide, a sense-encoded heterologous object sequence, and 3′ untranslated region. In some embodiments, the template RNA comprises, from 5′ to 3′, a 5′ untranslated region, a sense-encoded gene modifying polypeptide, anti-sense-encoded heterologous object sequence, and 3′ untranslated region.

[0412] It is understood that, when a template RNA is described as comprising an open reading frame or the reverse complement thereof, in some embodiments the template RNA must be converted into double stranded DNA (e.g., through reverse transcription) before the open reading frame can be transcribed and translated.

[0413] In certain embodiments, customized RNA sequence template can be identified, designed, engineered and constructed to contain sequences altering or specifying host genome function, for example by introducing a heterologous coding region into a genome; affecting or causing exon structure/alternative splicing; causing disruption of an endogenous gene; causing transcriptional activation of an endogenous gene; causing epigenetic regulation of an endogenous DNA; causing up- or down-regulation of operably liked genes, etc. In certain embodiments, a customized RNA sequence template can be engineered to contain sequences coding for exons and/or transgenes, provide for binding sites to transcription factor activators, repressors, enhancers, etc., and combinations of thereof. In other embodiments, the coding sequence can be further customized with splice acceptor sites, poly-A tails. In certain embodiments the RNA sequence can contain sequences coding for an RNA sequence template homologous to the retrotransposase, be engineered to contain heterologous coding sequences, or combinations thereof.

[0414] The template RNA may have some homology to the target DNA. In some embodiments the template RNA has at least 2, 3, 4, 5, 6, 7, 8, 9, 10, 11, 12, 13, 14, 15, 20, 25, 30, 35, 40, 45, 50, 60, 70, 80, 90, 100, 110, 120, 130, 140, 150, 175, 200 or more bases of exact homology to the target DNA at the 3′ end of the RNA. In some embodiments the template RNA has at least 2, 3, 4, 5, 6, 7, 8, 9, 10, 11, 12, 13, 14, 15, 20, 25, 30, 35, 40, 45, 50, 60, 70, 80, 90, 100, 110, 120, 130, 140, 150, 160, 175, 180, or 200 or more bases of at least 50%, 60%, 70%, 80%, 85%, 90%, 95%, 97%, 98%, 99% or 100% homology to the target DNA, e.g., at the 5′ end of the template RNA. In some embodiments, the template RNA has a 3′ untranslated region derived from a retrotransposon, e.g. a retrotransposons described herein. In some embodiments the template RNA has a 3′ region of at least 10, 15, 20, 25, 30, 40, 50, 60, 80, 100, 120, 140, 160, 180, 200 or more bases of at least 50%, 60%, 70%, 80%, 85%, 90%, 95%, 97%, 98%, 99% or 100% homology to the 3′ sequence of a retrotransposon, e.g., a retrotransposon described herein, e.g. a retrotransposon in Table R1. In some embodiments, the template RNA has a 5′ untranslated region derived from a retrotransposon, e.g. a retrotransposons described herein. In some embodiments the template RNA has a 5′ region of at least 10, 15, 20, 25, 30, 40, 50, 60, 80, 100, 120, 140, 160, 180, or 200 or more bases of at least 40%, 50%, 60%, 70%, 80%, 90%, 95% or greater homology to the 5′ sequence of a retrotransposon, e.g., a retrotransposon described herein, e.g. a retrotransposon described in Table R1.

[0415] The template RNA component of a gene modifying system described herein typically is able to bind the gene modifying protein of the system. In some embodiments, the template RNA has a 3′ region that is capable of binding a gene modifying genome editing protein. The binding region, e.g., 3′ region, may be a structured RNA region, e.g., having at least 1, 2 or 3 hairpin loops, capable of binding the gene modifying protein of the system.

[0416] The template RNA component of a gene modifying system described herein typically is able to bind the gene modifying protein of the system. In some embodiments, the template RNA has a 5′ region that is capable of binding a gene modifying protein. The binding region, e.g., 5′ region, may be a structured RNA region, e.g., having at least 1, 2 or 3 hairpin loops, capable of binding the gene modifying protein of the system. In some embodiments, the 5′ untranslated region comprises a pseudoknot, e.g., a pseudoknot that is capable of binding to the gene modifying protein.

[0417] In some embodiments, the template RNA (e.g., an untranslated region of the hairpin RNA, e.g., a 5′ untranslated region) comprises a stem-loop sequence. In some embodiments, the template RNA (e.g., an untranslated region of the hairpin RNA, e.g., a 5′ untranslated region) comprises a hairpin. In some embodiments, the template RNA (e.g., an untranslated region of the hairpin RNA, e.g., a 5′ untranslated region) comprises a helix. In some embodiments, the template RNA (e.g., an untranslated region of the hairpin RNA, e.g., a 5′ untranslated region) comprises a psuedoknot. In some embodiments, the template RNA comprises a ribozyme. In some embodiments the ribozyme is similar to a hepatitis delta virus (HDV) ribozyme, e.g., has a secondary structure like that of the HDV ribozyme and/or has one or more activities of the HDV ribozyme, e.g., a self-cleavage activity. See, e.g., Eickbush et al., Molecular and Cellular Biology, 2010, 3142-3150.

[0418] In some embodiments, the template RNA (e.g., an untranslated region of the hairpin RNA, e.g., a 3′ untranslated region) comprises one or more stem-loops or helices. Exemplary structures of R2 3′ UTRs are shown, for example, in Ruschak et al. “Secondary structure models of the 3′ untranslated regions of diverse R2 RNAs” RNA. 2004 June; 10(6): 978-987, e.g., at FIG. 3, therein, and in Eikbush and Eikbush, “R2 and R2/R1 hybrid non-autonomous retrotransposons derived by internal deletions of full-length elements” Mobile DNA (2012) 3:10; e.g., at FIG. 3 therein, which articles are hereby incorporated by reference in their entirety.

[0419] In some embodiments, a template RNA described herein comprises a sequence that is capable of binding to a gene modifying protein described herein. For instance, in some embodiments, the template RNA comprises an MS2 RNA sequence capable of binding to an MS2 coat protein sequence in the gene modifying protein. In some embodiments, the template RNA comprises an RNA sequence capable of binding to a B-box sequence. In some embodiments, in addition to or in place of a UTR, the template RNA is linked (e.g., covalently) to a non-RNA UTR, e.g., a protein or small molecule.

[0420] In some embodiments, the template RNA has a poly-A tail at the 3′ end. In some embodiments, the template RNA does not have a poly-A tail at the 3′ end.

[0421] In some embodiments the template RNA has a 5′ region of at least 10, 15, 20, 25, 30, 40, 50, 60, 80, 100, 120, 140, 160, 180, 200 or more bases of at least 40%, 50%, 60%, 70%, 80%, 90%, 95% or greater homology to the 5′ sequence of a retrotransposon, e.g., a retrotransposon described herein.

[0422] The template RNA of the system typically comprises an object sequence for insertion into a target DNA. The object sequence may be coding or non-coding.

[0423] In some embodiments, a system or method described herein comprises a single template RNA. In some embodiments, a system or method described herein comprises a plurality of template RNAs.

[0424] In some embodiments, the object sequence may contain an open reading frame. In some embodiments, the template RNA has a Kozak sequence. In some embodiments, the template RNA has an internal ribosome entry site. In some embodiments, the template RNA has a self-cleaving peptide such as a T2A or P2A site. In some embodiments, the template RNA has a start codon. In some embodiments, the template RNA has a splice acceptor site. In some embodiments, the template RNA has a splice donor site. Exemplary splice acceptor and splice donor sites are described in WO2016044416, incorporated herein by reference in its entirety. Exemplary splice acceptor site sequences are known to those of skill in the art and include, by way of example only, CTGACCCTTCTCTCTCTCCCCCAGAG (SEQ ID NO: 15428) (from human HBB gene) and TTTCTCTCCCACAAG (SEQ ID NO: 15429) (from human immunoglobulin-gamma gene). In some embodiments the template RNA, has a microRNA binding site downstream of the stop codon. In some embodiments, the template RNA has a polyA tail downstream of the stop codon of an open reading frame. In some embodiments, the template RNA comprises one or more exons. In some embodiments, the template RNA comprises one or more introns. In some embodiments, the template RNA comprises a eukaryotic transcriptional terminator. In some embodiments, the template RNA comprises an enhanced translation element or a translation enhancing element. In some embodiments, the RNA comprises the human T-cell leukemia virus (HTLV-1) R region. In some embodiments, the RNA comprises a posttranscriptional regulatory element that enhances nuclear export, such as that of Hepatitis B Virus (HPRE) or Woodchuck Hepatitis Virus (WPRE). In some embodiments, in the template RNA, the heterologous object sequence encodes a polypeptide and is coded in an antisense direction with respect to the 5′ and 3′ UTR. In some embodiments, in the template RNA, the heterologous object sequence encodes a polypeptide and is coded in a sense direction with respect to the 5′ and 3′ UTR.

[0425] In some embodiments, a nucleic acid described herein (e.g., a template RNA or a DNA encoding a template RNA) comprises a microRNA binding site. In some embodiments, the microRNA binding site is used to increase the target-cell specificity of a gene modifying system. For instance, the microRNA binding site can be chosen on the basis that is recognized by a miRNA that is present in a non-target cell type, but that is not present (or is present at a reduced level relative to the non-target cell) in a target cell type. Thus, when the template RNA is present in a non-target cell, it would be bound by the miRNA, and when the template RNA is present in a target cell, it would not be bound by the miRNA (or bound but at reduced levels relative to the non-target cell). While not wishing to be bound by theory, binding of the miRNA to the template RNA may interfere with insertion of the heterologous object sequence into the genome. Accordingly, the heterologous object sequence would be inserted into the genome of target cells more efficiently than into the genome of non-target cells. A system having a microRNA binding site in the template RNA (or DNA encoding it) may also be used in combination with a nucleic acid encoding a gene modifying polypeptide, wherein expression of the gene modifying polypeptide is regulated by a second microRNA binding site, e.g., as described herein, e.g., in the section entitled “Polypeptide component of gene modifying system.”

[0426] In some embodiments, the object sequence may contain a non-coding sequence. For example, the template RNA may comprise a promoter or enhancer sequence. In some embodiments, the template RNA comprises a tissue specific promoter or enhancer, each of which may be unidirectional or bidirectional. In some embodiments, the promoter is an RNA polymerase I promoter, RNA polymerase II promoter, or RNA polymerase III promoter. In some embodiments, the promoter comprises a TATA element. In some embodiments, the promoter comprises a B recognition element. In some embodiments, the promoter has one or more binding sites for transcription factors. In some embodiments, the non-coding sequence is transcribed in an antisense-direction with respect to the 5′ and 3′ UTR. In some embodiments, the non-coding sequence is transcribed in a sense direction with respect to the 5′ and 3′ UTR.

[0427] In some embodiments, a nucleic acid described herein (e.g., a template RNA or a DNA encoding a template RNA) comprises a promoter sequence, e.g., a tissue specific promoter sequence. In some embodiments, the tissue-specific promoter is used to increase the target-cell specificity of a gene modifying system. For instance, the promoter can be chosen on the basis that it is active in a target cell type but not active in (or active at a lower level in) a non-target cell type. Thus, even if the promoter integrated into the genome of a non-target cell, it would not drive expression (or only drive low-level expression) of an integrated gene. A system having a tissue-specific promoter sequence in the template RNA may also be used in combination with a microRNA binding site, e.g., in the template RNA or a nucleic acid encoding a gene modifying protein, e.g., as described herein. A system having a tissue-specific promoter sequence in the template RNA may also be used in combination with a DNA encoding a gene modifying polypeptide, driven by a tissue-specific promoter, e.g., to achieve higher levels of gene modifying protein in target cells than in non-target cells.

[0428] In some embodiments, a heterologous object sequence comprised by a template RNA (or DNA encoding the template RNA) is operably linked to at least one regulatory sequence. In some embodiments, the heterologous object sequence is operably linked to a tissue-specific promoter, such that expression of the heterologous object sequence, e.g., a therapeutic protein, is upregulated in target cells, as above. In some embodiments, the heterologous object sequence is operably linked to a miRNA binding site, such that expression of the heterologous object sequence, e.g., a therapeutic protein, is downregulated in cells with higher levels of the corresponding miRNA, e.g., non-target cells, as above.

[0429] In some embodiments, the template RNA comprises a microRNA sequence, a siRNA sequence, a guide RNA sequence, a piwi RNA sequence.

[0430] In some embodiments, the template RNA comprises a non-coding heterologous object sequence, e.g., a regulatory sequence. In some embodiments, integration of the heterologous object sequence thus alters the expression of an endogenous gene. In some embodiments, integration of the heterologous object sequence upregulates expression of an endogenous gene. In some embodiments, integration of the heterologous object sequence downregulated expression of an endogenous gene.

[0431] In some embodiments, the template RNA comprises a site that coordinates epigenetic modification. In some embodiments, the template RNA comprises an element that inhibits, e.g., prevents, epigenetic silencing. In some embodiments, the template RNA comprises a chromatin insulator. For example, the template RNA comprises a CTCF site or a site targeted for DNA methylation.

[0432] In order to promote higher level or more stable gene expression, the template RNA may include features that prevent or inhibit gene silencing. In some embodiments, these features prevent or inhibit DNA methylation. In some embodiments, these features promote DNA demethylation. In some embodiments, these features prevent or inhibit histone deacetylation. In some embodiments, these features prevent or inhibit histone methylation. In some embodiments, these features promote histone acetylation. In some embodiments, these features promote histone demethylation. In some embodiments, multiple features may be incorporated into the template RNA to promote one or more of these modifications. CpG dinucleotides are subject to methylation by host methyl transferases. In some embodiments, the template RNA is depleted of CpG dinucleotides, e.g., does not comprise CpG nucleotides or comprises a reduced number of CpG dinucleotides compared to a corresponding unaltered sequence. In some embodiments, the promoter driving transgene expression from integrated DNA is depleted of CpG dinucleotides.

[0433] In some embodiments, the template RNA comprises a gene expression unit composed of at least one regulatory region operably linked to an effector sequence. The effector sequence may be a sequence that is transcribed into RNA (e.g., a coding sequence or a non-coding sequence such as a sequence encoding a micro RNA).

[0434] In some embodiments, the object sequence of the template RNA is inserted into a target genome in an endogenous intron. In some embodiments, the object sequence of the template RNA is inserted into a target genome and thereby acts as a new exon. In some embodiments, the insertion of the object sequence into the target genome results in replacement of a natural exon or the skipping of a natural exon.

[0435] In some embodiments, the object sequence of the template RNA is inserted into the target genome in a genomic safe harbor site, such as AAVS1, CCR5, or ROSA26. In some embodiments, the object sequence of the template RNA is inserted into the albumin locus. In some embodiments, the object sequence of the template RNA is inserted into the TRAC locus. In some embodiments, the object sequence of the template RNA is added to the genome in an intergenic or intragenic region. In some embodiments, the object sequence of the template RNA is added to the genome 5′ or 3′ within 0.1 kb, 0.25 kb, 0.5 kb, 0.75, kb, 1 kb, 2 kb, 3 kb, 4 kb, 5 kb, 7.5 kb, 10 kb, 15 kb, 20 kb, 25 kb, 50, 75 kb, or 100 kb of an endogenous active gene. In some embodiments, the object sequence of the template RNA is added to the genome 5′ or 3′ within 0.1 kb, 0.25 kb, 0.5 kb, 0.75, kb, 1 kb, 2 kb, 3 kb, 4 kb, 5 kb, 7.5 kb, 10 kb, 15 kb, 20 kb, 25 kb, 50, 75 kb, or 100 kb of an endogenous promoter or enhancer. In some embodiments, the object sequence of the template RNA can be, e.g., 50-50,000 base pairs (e.g., between 50-40,000 bp, between 500-30,000 bp between 500-20,000 bp, between 100-15,000 bp, between 500-10,000 bp, between 50-10,000 bp, between 50-5,000 bp. In some embodiments, the heterologous object sequence is less than 1,000, 1,300, 1500, 2,000, 3,000, 4,000, 5,000, or 7,500 nucleotides in length.

[0436] In some embodiments, the genomic safe harbor site is a Natural Harbor™ site. In some embodiments, the Natural Harbor™ site is ribosomal DNA (rDNA). In some embodiments, the Natural Harbor™ site is 5S rDNA, 18S rDNA, 5.8S rDNA, or 28S rDNA. In some embodiments, the Natural Harbor™ site is the Mutsu site in 5S rDNA. In some embodiments, the Natural Harbor™ site is the R2 site, the R5 site, the R6 site, the R4 site, the R1 site, the R9 site, or the RT site in 28S rDNA. In some embodiments, the Natural Harbor™ site is the R8 site or the R7 site in 18S rDNA. In some embodiments, the Natural Harbor™ site is DNA encoding transfer RNA (tRNA). In some embodiments, the Natural Harbor™ site is DNA encoding tRNA-Asp or tRNA-Glu. In some embodiments, the Natural Harbor™ site is DNA encoding spliceosomal RNA. In some embodiments, the Natural Harbor™ site is DNA encoding small nuclear RNA (snRNA) such as U2 snRNA.

[0437] Thus, in some aspects, the present disclosure provides a method of inserting a heterologous object sequence into a Natural Harbor™ site. In some embodiments, the method comprises using a gene modifying system described herein, e.g., using a polypeptide of any of Table X, Z1, Z2, 3A, or 3B of PCT Pub. No.: WO/2021/178717 or a polypeptide having sequence similarity thereto, e.g., at least 80%, 85%, 90%, or 95% identity thereto. In some embodiments, the method comprises using an enzyme, e.g., a retrotransposase, to insert the heterologous object sequence into the Natural Harbor™ site. In some aspects, the present disclosure provides a host human cell comprising a heterologous object sequence (e.g., a sequence encoding a therapeutic polypeptide) situated at a Natural Harbor™ site in the genome of the cell. In some embodiments, the Natural Harbor™ site is a site described in Table 4 below. In some embodiments, the heterologous object sequence is inserted within 20, 50, 100, 150, 200, 250, 500, or 1000 base pairs of a sequence shown in Table 4. In some embodiments, the heterologous object sequence is inserted within 0.1 kb, 0.25 kb, 0.5 kb, 0.75, kb, 1 kb, 2 kb, 3 kb, 4 kb, 5 kb, 7.5 kb, 10 kb, 15 kb, 20 kb, 25 kb, 50, 75 kb, or 100 kb of a sequence shown in Table 4. In some embodiments, the heterologous object sequence is inserted into a site having at least 70%, 75%, 80%, 85%, 90%, 95%, 96%, 97%, 98%, or 99% identity to a sequence shown in Table 4. In some embodiments, the heterologous object sequence is inserted within 20, 50, 100, 150, 200, 250, 500, or 1000 base pairs, or within 0.1 kb, 0.25 kb, 0.5 kb, 0.75, kb, 1 kb, 2 kb, 3 kb, 4 kb, 5 kb, 7.5 kb, 10 kb, 15 kb, 20 kb, 25 kb, 50, 75 kb, or 100 kb, of a site having at least 70%, 75%, 80%, 85%, 90%, 95%, 96%, 97%, 98%, or 99% identity to a sequence shown in Table 4. In some embodiments, the heterologous object sequence is inserted within a gene indicated in Column 5 of Table 4, or within 20, 50, 100, 150, 200, 250, 500, or 1000 base pairs, or within 0.1 kb, 0.25 kb, 0.5 kb, 0.75, kb, 1 kb, 2 kb, 3 kb, 4 kb, 5 kb, 7.5 kb, 10 kb, 15 kb, 20 kb, 25 kb, 50, 75 kb, or 100 kb, of the gene.

TABLE 4
Natural Harbor ™ sites. Column 1 indicates a retrotransposon that inserts
into the Natural Harbor ™ site. Column 2 indicates the gene at the Natural Harbor ™ site.
Columns 3 and 4 show exemplary human genome sequence 5′ and 3′ of the insertion site (for
example, 250 bp). Columns 5 and 6 list the example gene symbol and corresponding Gene ID.

| | | | | Example | |
|---|---|---|---|---|---|
| Target | Target | | | Gene | Example |
| Site | Gene | 5′ flanking sequence | 3′ flanking sequence | Symbol | Gene ID |
| R2 | 28S rDNA | CCGGTCCCCCCCGCCGGGTCC | GTAGCCAAATGCCTCGTCATC | RNA28SN1 | 106632264 |
| | | GCCCCCGGGGCCGCGGTTCC | TAATTAGTGACGCGCATGAAT | | |
| | | GCGCGGCGCCTCGCCTCGGC | GGATGAACGAGATTCCCACT | | |
| | | CGGCGCCTAGCAGCCGACTT | GTCCCTACCTACTATCCAGCG | | |
| | | AGAACTGGTGCGGACCAGGG | AAACCACAGCCAAGGGAACG | | |
| | | GAATCCGACTGTTTAATTAAA | GGCTTGGCGGAATCAGCGGG | | |
| | | ACAAAGCATCGCGAAGGCCC | GAAAGAAGACCCTGTTGAGC | | |
| | | GCGGCGGGTGTTGACGCGAT | TTGACTCTAGTCTGGCACGGT | | |
| | | GTGATTTCTGCCCAGTGCTCT | GAAGAGACATGAGAGGTGTA | | |
| | | GAATGTCAAAGTGAAGAAAT | GAATAAGTGGGAGGCCCCCG | | |
| | | TCAATGAAGCGCGGGTAAAC | GCGCCCCCCCGGTGTCCCCGC | | |
| | | GGCGGGAGTAACTATGACTC | GAGGGGCCCGGGGGGGGGT | | |
| | | TCTTAAG (SEQ ID NO: | CCGCCG (SEQ ID NO: 1513) | | |
| | | 1508) | | | |
| R4 | 28S rDNA | GCGGTTCCGCGCGGCGCCTC | CGCATGAATGGATGAACGAG | RNA28SN1 | 106632264 |
| | | GCCTCGGCCGGCGCCTAGCA | ATTCCCACTGTCCCTACCTACT | | |
| | | GCCGACTTAGAACTGGTGCG | ATCCAGCGAAACCACAGCCA | | |
| | | GACCAGGGGAATCCGACTGT | AGGGAACGGGCTTGGCGGA | | |
| | | TTAATTAAAACAAAGCATCGC | ATCAGCGGGGAAAGAAGACC | | |
| | | GAAGGCCCGCGGCGGGTGTT | CTGTTGAGCTTGACTCTAGTC | | |
| | | GACGCGATGTGATTTCTGCCC | TGGCACGGTGAAGAGACATG | | |
| | | AGTGCTCTGAATGTCAAAGT | AGAGGTGTAGAATAAGTGGG | | |
| | | GAAGAAATTCAATGAAGCGC | AGGCCCCCGGCGCCCCCCCG | | |
| | | GGGTAAACGGCGGGAGTAAC | GTGTCCCCGCGAGGGGCCCG | | |
| | | TATGACTCTCTTAAGGTAGCC | GGGCGGGGTCCGCCGGCCCT | | |
| | | AAATGCCTCGTCATCTAATTA | GCGGGCCGCCGGTGAAATAC | | |
| | | GTGACG (SEQ ID NO: | CACTACTC (SEQ ID NO: | | |
| | | 1509) | 1514) | | |
| R5 | 28S rDNA | TCCCCCCCGCCGGGTCCGCCC | CCAAATGCCTCGTCATCTAAT | RNA28SN1 | 106632264 |
| | | CCGGGGCCGCGGTTCCGCGC | TAGTGACGCGCATGAATGGA | | |
| | | GGCGCCTCGCCTCGGCCGGC | TGAACGAGATTCCCACTGTCC | | |
| | | GCCTAGCAGCCGACTTAGAA | CTACCTACTATCCAGCGAAAC | | |
| | | CTGGTGCGGACCAGGGGAAT | CACAGCCAAGGGAACGGGCT | | |
| | | CCGACTGTTTAATTAAAACAA | TGGCGGAATCAGCGGGGAAA | | |
| | | AGCATCGCGAAGGCCCGCGG | GAAGACCCTGTTGAGCTTGA | | |
| | | CGGGTGTTGACGCGATGTGA | CTCTAGTCTGGCACGGTGAA | | |
| | | TTTCTGCCCAGTGCTCTGAAT | GAGACATGAGAGGTGTAGAA | | |
| | | GTCAAAGTGAAGAAATTCAA | TAAGTGGGAGGCCCCCGGCG | | |
| | | TGAAGCGCGGGTAAACGGCG | CCCCCCCGGTGTCCCCGCGAG | | |
| | | GGAGTAACTATGACTCTCTTA | GGGCCCGGGGCGGGGTCCG | | |
| | | AGGTAG (SEQ ID NO: | CCGGCCC (SEQ ID NO: 1515) | | |
| | | 1510) | | | |
| R9 | 28S rDNA | CGGCGCGCTCGCCGGCCGAG | TAGCTGGTTCCCTCCGAAGTT | RNA28SN1 | 106632264 |
| | | GTGGGATCCCGAGGCCTCTC | TCCCTCAGGATAGCTGGCGCT | | |
| | | CAGTCCGCCGAGGGCGCACC | CTCGCAGACCCGACGCACCCC | | |
| | | ACCGGCCCGTCTCGCCCGCCG | CGCCACGCAGTTTTATCCGGT | | |
| | | CGCCGGGGAGGTGGAGCAC | AAAGCGAATGATTAGAGGTC | | |
| | | GAGCGCACGTGTTAGGACCC | TTGGGGCCGAAACGATCTCA | | |
| | | GAAAGATGGTGAACTATGCC | ACCTATTCTCAAACTTTAAAT | | |
| | | TGGGCAGGGCGAAGCCAGA | GGGTAAGAAGCCCGGCTCGC | | |
| | | GGAAACTCTGGTGGAGGTCC | TGGCGTGGAGCCGGGCGTGG | | |
| | | GTAGCGGTCCTGACGTGCAA | AATGCGAGTGCCTAGTGGGC | | |
| | | ATCGGTCGTCCGACCTGGGT | CACTTTTGGTAAGCAGAACTG | | |
| | | ATAGGGGCGAAAGACTAATC | GCGCTGCGGGATGAACCGAA | | |
| | | GAACCATCTAG (SEQ ID NO: | CGCC (SEQ ID NO: 1516) | | |
| | | 1511) | | | |
| R8 | 18S rDNA | GCATTCGTATTGCGCCGCTAG | TGAAACTTAAAGGAATTGAC | RNA18SN1 | 106631781 |
| | | AGGTGAAATTCTTGGACCGG | GGAAGGGCACCACCAGGAGT | | |
| | | CGCAAGACGGACCAGAGCGA | GGAGCCTGCGGCTTAATTTG | | |
| | | AAGCATTTGCCAAGAATGTTT | ACTCAACACGGGAAACCTCA | | |
| | | TCATTAATCAAGAACGAAAGT | CCCGGCCCGGACACGGACAG | | |
| | | CGGAGGTTCGAAGACGATCA | GATTGACAGATTGATAGCTCT | | |
| | | GATACCGTCGTAGTTCCGACC | TTCTCGATTCCGTGGGTGGTG | | |
| | | ATAAACGATGCCGACCGGCG | GTGCATGGCCGTTCTTAGTTG | | |
| | | ATGCGGCGGCGTTATTCCCAT | GTGGAGCGATTTGTCTGGTT | | |
| | | GACCCGCCGGGCAGCTTCCG | AATTCCGATAACGAACGAGA | | |
| | | GGAAACCAAAGTCTTTGGGT | CTCTGGCATGCTAACTAGTTA | | |
| | | TCCGGGGGGAGTATGGTTGC | CGCGACCCCCGAGCGGTCGG | | |
| | | AAAGC (SEQ ID NO: 1512) | CGTCCC (SEQ ID NO: 1517) | | |
| R4- | tRNA-Asp | | | TRD-GTC1-1 | 100189207 |
| 2_SRa | | | | | |
| LIN25_ | tRNA-Glu | | | TRE-CTC1-1 | 100189384 |
| SM | | | | | |
| R1 | 28S rDNA | TAGCAGCCGACTTAGAACTG | ACCTACTATCCAGCGAAACCA | RNA28SN1 | 106632264 |
| | | GTGCGGACCAGGGGAATCCG | CAGCCAAGGGAACGGGCTTG | | |
| | | ACTGTTTAATTAAAACAAAGC | GCGGAATCAGCGGGGAAAG | | |
| | | ATCGCGAAGGCCCGCGGCGG | AAGACCCTGTTGAGCTTGACT | | |
| | | GTGTTGACGCGATGTGATTTC | CTAGTCTGGCACGGTGAAGA | | |
| | | TGCCCAGTGCTCTGAATGTCA | GACATGAGAGGTGTAGAATA | | |
| | | AAGTGAAGAAATTCAATGAA | AGTGGGAGGCCCCCGGCGCC | | |
| | | GCGCGGGTAAACGGCGGGA | CCCCCGGTGTCCCCGCGAGG | | |
| | | GTAACTATGACTCTCTTAAGG | GGCCCGGGGCGGGGTCCGCC | | |
| | | TAGCCAAATGCCTCGTCATCT | GGCCCTGCGGGCCGCCGGTG | | |
| | | AATTAGTGACGCGCATGAAT | AAATACCACTACTCTGATCGT | | |
| | | GGATGAACGAGATTCCCACT | TTTTTCACTGACCCGGTGAGG | | |
| | | GTCCCT (SEQ ID NO: | CGGGGGG (SEQ ID NO: | | |
| | | 1518) | 1524) | | |
| R6 | 28S rDNA | CCCCCCGCCGGGTCCGCCCCC | AAATGCCTCGTCATCTAATTA | RNA28SN1 | 106632264 |
| | | GGGGCCGCGGTTCCGCGCGG | GTGACGCGCATGAATGGATG | | |
| | | CGCCTCGCCTCGGCCGGCGC | AACGAGATTCCCACTGTCCCT | | |
| | | CTAGCAGCCGACTTAGAACT | ACCTACTATCCAGCGAAACCA | | |
| | | GGTGCGGACCAGGGGAATCC | CAGCCAAGGGAACGGGCTTG | | |
| | | GACTGTTTAATTAAAACAAAG | GCGGAATCAGCGGGGAAAG | | |
| | | CATCGCGAAGGCCCGCGGCG | AAGACCCTGTTGAGCTTGACT | | |
| | | GGTGTTGACGCGATGTGATT | CTAGTCTGGCACGGTGAAGA | | |
| | | TCTGCCCAGTGCTCTGAATGT | GACATGAGAGGTGTAGAATA | | |
| | | CAAAGTGAAGAAATTCAATG | AGTGGGAGGCCCCCGGCGCC | | |
| | | AAGCGCGGGTAAACGGCGG | CCCCCGGTGTCCCCGCGAGG | | |
| | | GAGTAACTATGACTCTCTTAA | GGCCCGGGGCGGGGTCCGCC | | |
| | | GGTAGCC (SEQ ID NO: | GGCCCTG (SEQ ID NO: 1525) | | |
| | | 1519) | | | |
| R7 | 18S rDNA | GCGCAAGACGGACCAGAGCG | GGAGCCTGCGGCTTAATTTG | RNA18SN1 | 106631781 |
| | | AAAGCATTTGCCAAGAATGTT | ACTCAACACGGGAAACCTCA | | |
| | | TTCATTAATCAAGAACGAAAG | CCCGGCCCGGACACGGACAG | | |
| | | TCGGAGGTTCGAAGACGATC | GATTGACAGATTGATAGCTCT | | |
| | | AGATACCGTCGTAGTTCCGAC | TTCTCGATTCCGTGGGTGGTG | | |
| | | CATAAACGATGCCGACCGGC | GTGCATGGCCGTTCTTAGTTG | | |
| | | GATGCGGCGGCGTTATTCCC | GTGGAGCGATTTGTCTGGTT | | |
| | | ATGACCCGCCGGGCAGCTTC | AATTCCGATAACGAACGAGA | | |
| | | CGGGAAACCAAAGTCTTTGG | CTCTGGCATGCTAACTAGTTA | | |
| | | GTTCCGGGGGGAGTATGGTT | CGCGACCCCCGAGCGGTCGG | | |
| | | GCAAAGCTGAAACTTAAAGG | CGTCCCCCAACTTCTTAGAGG | | |
| | | AATTGACGGAAGGGCACCAC | GACAAGTGGCGTTCAGCCAC | | |
| | | CAGGAGT (SEQ ID NO: | CCGAG (SEQ ID NO: 1526) | | |
| | | 1520) | | | |
| RT | 28S rDNA | GGCCGGGCGCGACCCGCTCC | AACTGGCTTGTGGCGGCCAA | RNA28SN1 | 106632264 |
| | | GGGGACAGTGCCAGGTGGG | GCGTTCATAGCGACGTCGCTT | | |
| | | GAGTTTGACTGGGGCGGTAC | TTTGATCCTTCGATGTCGGCT | | |
| | | ACCTGTCAAACGGTAACGCA | CTTCCTATCATTGTGAAGCAG | | |
| | | GGTGTCCTAAGGCGAGCTCA | AATTCACCAAGCGTTGGATTG | | |
| | | GGGAGGACAGAAACCTCCCG | TTCACCCACTAATAGGGAACG | | |
| | | TGGAGCAGAAGGGCAAAAG | TGAGCTGGGTTTAGACCGTC | | |
| | | CTCGCTTGATCTTGATTTTCA | GTGAGACAGGTTAGTTTTACC | | |
| | | GTACGAATACAGACCGTGAA | CTACTGATGATGTGTTGTTGC | | |
| | | AGCGGGGCCTCACGATCCTTC | CATGGTAATCCTGCTCAGTAC | | |
| | | TGACCTTTTGGGTTTTAAGCA | GAGAGGAACCGCAGGTTCAG | | |
| | | GGAGGTGTCAGAAAAGTTAC | ACATTTGGTGTATGTGCTTGG | | |
| | | CACAGGGAT (SEQ ID NO: | C (SEQ ID NO: 1527) | | |
| | | 1521) | | | |
| Mutsu | 5S rDNA | GTCTACGGCCATACCACCC | TGAACGCGCCCGATCTCGTCT | RNA5S1 | 100169751 |
| | | (SEQ ID NO: 1522) | GATCTCGGAAGCTAAGCAGG | | |
| | | | GTCGGGCCTGGTTAGTACTT | | |
| | | | GGATGGGAGACCGCCTGGGA | | |
| | | | ATACCGGGTGCTGTAGGCTTT | | |
| | | | (SEQ ID NO: 1528) | | |
| Utopia/ | U2 snRNA | ATCGCTTCTCGGCCTTTTGGC | TCTGTTCTTATCAGTTTAATAT | RNU2-1 | 6066 |
| Keno | | TAAGATCAAGTGTAGTA (SEQ | CTGATACGTCCTCTATCCGAG | | |
| | | ID NO: 1523) | GACAATATATTAAATGGATTT | | |
| | | | TTGGAGCAGGGAGATGGAAT | | |
| | | | AGGAGCTTGCTCCGTCCACTC | | |
| | | | CACGCATCGACCTGGTATTGC | | |
| | | | AGTACCTCCAGGAACGGTGC | | |
| | | | ACCC (SEQ ID NO: 1529) | | |

[0438] In some embodiments, a system or method described herein results in insertion of a heterologous sequence into a target site in the human genome. In some embodiments, the target site in the human genome has sequence similarity to the corresponding target site of the corresponding wild-type retrotransposase (e.g., the retrotransposase from which the gene modifying polypeptide was derived) in the genome of the organism to which it is native. For instance, in some embodiments, the identity between the 40 nucleotides of human genome sequence centered at the insertion site and the 40 nucleotides of native organism genome sequence centered at the insertion site is less than 99.5%, 99%, 98%, 97%, 96%, 95%, 90%, 85%, 80%, 75%, 70%, 60%, or 50%, or is between 50-60%, 60-70%, 70-80%, 80-90%, or 90-100%. In some embodiments, the identity between the 100 nucleotides of human genome sequence centered at the insertion site and the 100 nucleotides of native organism genome sequence centered at the insertion site is less than 99.5%, 99%, 98%, 97%, 96%, 95%, 90%, 85%, 80%, 75%, 70%, 60%, or 50%, or is between 50-60%, 60-70%, 70-80%, 80-90%, or 90-100%. In some embodiments, the identity between the 500 nucleotides of human genome sequence centered at the insertion site and the 500 nucleotides of native organism genome sequence centered at the insertion site is less than 99.5%, 99%, 98%, 97%, 96%, 95%, 90%, 85%, 80%, 75%, 70%, 60%, or 50%, or is between 50-60%, 60-70%, 70-80%, 80-90%, or 90-100%.

[0439] The template nucleic acid (e.g., template RNA) component of a gene modifying system described herein typically is able to bind the gene modifying protein of the system. In some embodiments, the template nucleic acid (e.g., template RNA) has a 3′ region that is capable of binding a gene modifying protein. The binding region, e.g., 3′ region, may be a structured RNA region, e.g., having at least 1, 2 or 3 hairpin loops, capable of binding the gene modifying protein of the system. The binding region may associate the template nucleic acid (e.g., template RNA) with any of the polypeptide modules. In some embodiments, the binding region of the template nucleic acid (e.g., template RNA) may associate with an RNA-binding domain in the polypeptide. In some embodiments, the binding region of the template nucleic acid (e.g., template RNA) may associate with the reverse transcription domain of the polypeptide (e.g., specifically bind to the RT domain). For example, where the reverse transcription domain is derived from a non-LTR retrotransposon, the template nucleic acid (e.g., template RNA) may contain a binding region derived from a non-LTR retrotransposon, e.g., a 3′ UTR from a non-LTR retrotransposon. In some embodiments a system or method described herein comprises a single template nucleic acid (e.g., template RNA). In some embodiments a system or method described herein comprises a plurality of template nucleic acids (e.g., template RNAs). In some embodiments, when the system comprises a plurality of nucleic acids, each nucleic acid comprises a conjugating domain. In some embodiments, a conjugating domain enables association of nucleic acid molecules, e.g., by hybridization of complementary sequences.

[0440] In some embodiments, the template nucleic acid may comprise one or more UTRs (e.g., a 5′ UTR or a 3′ UTR, e.g., from an R2-type retrotransposon). In some embodiments, the UTR facilitates interaction of the template with the reverse transcriptase domain of the polypeptide. In some embodiments, the template possesses one or more sequences aiding in association of the template with the gene modifying polypeptide. In some embodiments, these sequences may be derived from retrotransposon UTRs. In some embodiments, the UTRs may be located flanking the desired insertion sequence. In some embodiments, a sequence with target site homology may be located outside of one or both UTRs. In some embodiments, the sequence with target site homology can anneal to the target sequence to prime reverse transcription. In some embodiments, the 5′ and/or 3′ UTR may be located terminal to the target site homology sequence. In some embodiments, the gene modifying system may result in the insertion of a desired payload without any additional sequence (e.g., a gene expression unit without UTRs used to bind the gene modifying protein).

[0441] In some embodiments, the template RNA comprises one or more of the following sequences from 5′ to 3′: 5′ UTR, polyadenylation signal, an object sequence for incorporation into the genome (e.g., a sequence encoding a CAR), Kozak sequence, promoter, 3′ UTR. In some embodiments, the template RNA comprises one or more of the following sequences from 5′ to 3′: 5′ UTR, bGHpA, an object sequence for incorporation into the genome (e.g., a sequence encoding a CAR), Kozak sequence, EF1a short promoter, 3′ UTR. In some embodiments, the template RNA comprises one or more of the following sequences from 5′ to 3′: 5′ UTR, bGHpA, WPRE, an object sequence for incorporation into the genome (e.g., a sequence encoding a CAR), Kozak sequence, EF1a short promoter, 3′ UTR. In some embodiments, the template RNA comprises one or more of the following sequences from 5′ to 3′: 5′ UTR, bGHpA, an object sequence for incorporation into the genome (e.g., a sequence encoding a CAR), Kozak sequence, MIND promoter, 3′ UTR. In some embodiments, the template RNA comprises one or more of the following sequences from 5′ to 3′: 5′ UTR, bGHpA, WPRE, an object sequence for incorporation into the genome (e.g., a sequence encoding a CAR), Kozak sequence, MND promoter, 3′ UTR.

[0442] In some embodiments, the template RNA comprises a 5′ UTR. In some embodiments, the template RNA comprises bGHpA. In some embodiments, the template RNA comprises WPRE. In some embodiments, the template RNA comprises a Kozak sequence. In some embodiments, the template RNA comprises an EF1a short promoter. In some embodiments, the template RNA comprises an MIND promoter. In some embodiments, the template RNA comprises a 3′ UTR.

[0443] In some embodiments, the template RNA comprises one or more of the following sequences from 5′ to 3′: 5′ UTR, TKpA, an object sequence for incorporation into the genome (e.g., a sequence encoding a CAR), Kozak sequence, EF1a short promoter or MIND promoter, 3′ UTR.

[0444] In some embodiments, the template RNA comprises a 5′ UTR. In some embodiments, the template RNA comprises TKpA. In some embodiments, the template RNA comprises a Kozak sequence. In some embodiments, the template RNA comprises an EF1a short promoter. In some embodiments, the template RNA comprises an MND promoter. In some embodiments, the template RNA comprises a 3′ UTR.

[0445] In some embodiments, the template RNA comprises a safety gene or switch, such as, for example, a caspase (e.g., caspase-9 or iCasp-9) or RQR8. In some embodiments, the template RNA comprises one or more of the following sequences from 5′ to 3′: 5′ UTR, bGHpA, WPRE, an object sequence for incorporation into the genome (e.g., a sequence encoding a CAR), RQR8, Kozak sequence, MND promoter, 3′ UTR. In some embodiments, the template RNA comprises one or more of the following sequences from 5′ to 3′: 5′ UTR, bGHpA, WPRE, an object sequence for incorporation into the genome (e.g., a sequence encoding a CAR), RQR8, Kozak sequence, MND promoter, 3′ UTR. In some embodiments, the RQR8 comprises an amino acid sequence according to SEQ ID NO: 15453, or a sequence having at least 80%, 90%, 95%, or 99% identity thereto.

[0446] The template nucleic acid (e.g., template RNA) can be designed to result in insertions, mutations, or deletions at the target DNA locus. In some embodiments, the template nucleic acid (e.g., template RNA) may be designed to cause an insertion in the target DNA. For example, the template nucleic acid (e.g., template RNA) may contain a heterologous sequence, wherein the reverse transcription will result in insertion of the heterologous sequence into the target DNA. In other embodiments, the RNA template may be designed to write a deletion into the target DNA. For example, the template nucleic acid (e.g., template RNA) may match the target DNA upstream and downstream of the desired deletion, wherein the reverse transcription will result in the copying of the upstream and downstream sequences from the template nucleic acid (e.g., template RNA) without the intervening sequence, e.g., causing deletion of the intervening sequence. In other embodiments, the template nucleic acid (e.g., template RNA) may be designed to write an edit into the target DNA. For example, the template RNA may match the target DNA sequence with the exception of one or more nucleotides, wherein the reverse transcription will result in the copying of these edits into the target DNA, e.g., resulting in mutations, e.g., transition or transversion mutations.

[0447] In some embodiments, a gene modifying system is capable of producing an insertion into the target site of at least 45, 50, 55, 60, 65, 70, 75, 80, 85, 90, 95, or 100 nucleotides (and optionally no more than 500, 400, 300, 200, or 100 nucleotides). In some embodiments, a gene modifying system is capable of producing an insertion into the target site of at least 1, 2, 3, 4, 5, 6, 7, 8, 9, 10, 15, 20, 25, 30, 35, 40, 45, 50, 55, 60, 65, 70, 75, 80, 85, 90, 95, or 100 nucleotides (and optionally no more than 500, 400, 300, 200, or 100 nucleotides). In some embodiments, a gene modifying system is capable of producing an insertion into the target site of at least 0.2, 0.3, 0.4, 0.5, 0.6, 0.7, 0.8, 0.9, 1, 1.5, 2, 2.5, 3, 3.5, 4, 4.5, 5, 5.5, 6, 6.5, 7, 7.5, 8, 8.5, 9, 9.5 or 10 kilobases (and optionally no more than 1, 5, 10, or 20 kilobases). In some embodiments, a gene modifying system is capable of producing a deletion of at least 81, 85, 90, 95, 100, 110, 120, 130, 140, 150, 160, 170, 180, 190, or 200 nucleotides (and optionally no more than 500, 400, 300, or 200 nucleotides). In some embodiments, a gene modifying system is capable of producing a deletion of at least 81, 85, 90, 95, 100, 110, 120, 130, 140, 150, 160, 170, 180, 190, or 200 nucleotides (and optionally no more than 500, 400, 300, or 200 nucleotides). In some embodiments, a gene modifying system is capable of producing a deletion of at least 1, 2, 3, 4, 5, 6, 7, 8, 9, 10, 15, 20, 25, 30, 35, 40, 45, 50, 55, 60, 65, 70, 75, 80, 85, 90, 95, 100, 110, 120, 130, 140, 150, 160, 170, 180, 190, or 200 nucleotides (and optionally no more than 500, 400, 300, or 200 nucleotides). In some embodiments, a gene modifying system is capable of producing a deletion of at least 0.2, 0.3, 0.4, 0.5, 0.6, 0.7, 0.8, 0.9, 1, 1.5, 2, 2.5, 3, 3.5, 4, 4.5, 5, 5.5, 6, 6.5, 7, 7.5, 8, 8.5, 9, 9.5 or 10 kilobases (and optionally no more than 1, 5, 10, or 20 kilobases).

### Methods and Compositions for Modified RNA (e.g., Template RNA)

[0448] In some embodiments, an RNA component of the system (e.g., a template RNA, as described herein) comprises one or more nucleotide modifications. In some embodiments, the modification pattern of the template RNA can significantly affect in vivo activity compared to unmodified or end-modified guides. Without wishing to be bound by theory, this process may be due, at least in part, to a stabilization of the RNA conferred by the modifications. Non-limiting examples of such modifications may include 2′-O-methyl (2′-O-Me), 2′-O-(2-methoxyethyl) (2′-O-MOE), 2′-fluoro (2′-F), phosphorothioate (PS) bond between nucleotides, G-C substitutions, and inverted abasic linkages between nucleotides and equivalents thereof.

[0449] In some embodiments, the template RNA (e.g., at the portion thereof that binds a target site) comprises a 5′ terminus region. In some embodiments, the template RNA does not comprise a 5′ terminus region. In some embodiments, the 5′ terminus region comprises a 5′ end modification. In some embodiments, the template RNA comprises a 2′-O-methyl (2′-O-Me) modified nucleotide. In some embodiments, the template RNA comprises a 2′-O-(2-methoxy ethyl) (2′-O-moe) modified nucleotide. In some embodiments, the template RNA comprises a 2′-fluoro (2′-F) modified nucleotide. In some embodiments, the template RNA comprises a phosphorothioate (PS) bond between nucleotides. In some embodiments, the template RNA comprises a 5′ end modification, a 3′ end modification, or 5′ and 3′ end modifications. In some embodiments, the 5′ end modification comprises a phosphorothioate (PS) bond between nucleotides. In some embodiments, the 5′ end modification comprises a 2′-O-methyl (2′-O-Me), 2′-O-(2-methoxy ethyl) (2′-O-MOE), and/or 2′-fluoro (2′-F) modified nucleotide. In some embodiments, the 5′ end modification comprises at least one phosphorothioate (PS) bond and one or more of a 2′-O-methyl (2′-O-Me), 2′-O-(2-methoxyethyl) (2′-O-MOE), and/or 2′-fluoro (2′-F) modified nucleotide. The end modification may comprise a phosphorothioate (PS), 2′-O-methyl (2′-O-Me), 2′-O-(2-methoxyethyl) (2′-O-MOE), and/or 2′-fluoro (2′-F) modification. Equivalent end modifications are also encompassed by embodiments described herein. In some embodiments, the template RNA comprises an end modification in combination with a modification of one or more regions of the template RNA. In some embodiments, structure-guided and systematic approaches are used to introduce modifications (e.g., 2′-OMe-RNA, 2′-F-RNA, and PS modifications) to a template RNA, for example, as described in Mir et al. Nat Commun 9:2641 (2018) (incorporated by reference herein in its entirety). In some embodiments, the incorporation of 2′-F-RNAs increases thermal and nuclease stability of RNA:RNA or RNA:DNA duplexes, e.g., while minimally interfering with C3′-endo sugar puckering. In some embodiments, 2′-F may be better tolerated than 2′-OMe at positions where the 2′-OH is important for RNA:DNA duplex stability. In some embodiments, structure-guided and systematic approaches (e.g., as described in Mir et al. Nat Commun 9:2641 (2018); incorporated herein by reference in its entirety) are employed to find modifications for the template RNA. In some embodiments, a structure of polypeptide bound to template RNA is used to determine non-protein-contacted nucleotides of the RNA that may then be selected for modifications, e.g., with lower risk of disrupting the association of the RNA with the polypeptide. Secondary structures in a template RNA can also be predicted in silico by software tools, e.g., the RNAstructure tool available at rna.urmc.rochester.edu/RNAstructureWeb (Bellaousov et al. Nucleic Acids Res 41:W471-W474 (2013); incorporated by reference herein in its entirety), e.g., to determine secondary structures for selecting modifications, e.g., hairpins, stems, and/or bulges.

[0450] It is contemplated that it may be useful to employ circular and/or linear RNA states during the formulation, delivery, or gene modifying reaction within the target cell. Thus, in some embodiments of any of the aspects described herein, a gene modifying system comprises one or more circular RNAs (circRNAs). In some embodiments of any of the aspects described herein, a gene modifying system comprises one or more linear RNAs. In some embodiments, a nucleic acid as described herein (e.g., a template nucleic acid, a nucleic acid molecule encoding a gene modifying polypeptide, or both) is a circRNA. In some embodiments, a circular RNA molecule encodes the gene modifying polypeptide. In some embodiments, the circRNA molecule encoding the gene modifying polypeptide is delivered to a host cell. In some embodiments, the circRNA molecule encoding the gene modifying polypeptide is linearized (e.g., in the host cell, e.g., in the nucleus of the host cell) prior to translation.

[0451] Circular RNAs (circRNAs) have been found to occur naturally in cells and have been found to have diverse functions, including both non-coding and protein coding roles in human cells. It has been shown that a circRNA can be engineered by incorporating a self-splicing intron into an RNA molecule (or DNA encoding the RNA molecule) that results in circularization of the RNA, and that an engineered circRNA can have enhanced protein production and stability (Wesselhoeft et al. Nature Communications 2018). In some embodiments, the gene modifying polypeptide is encoded as circRNA. In certain embodiments, the template nucleic acid is a DNA, such as a dsDNA or ssDNA.

[0452] In some embodiments, the circRNA comprises one or more ribozyme sequences. In some embodiments, the ribozyme sequence is activated for autocleavage, e.g., in a host cell, e.g., thereby resulting in linearization of the circRNA. In some embodiments, the ribozyme is activated when the concentration of magnesium reaches a sufficient level for cleavage, e.g., in a host cell. In some embodiments, the circRNA is maintained in a low magnesium environment prior to delivery to the host cell. In some embodiments, the ribozyme is a protein-responsive ribozyme. In some embodiments, the ribozyme is a nucleic acid-responsive ribozyme. In some embodiments, the circRNA comprises a cleavage site. In some embodiments, the circRNA comprises a second cleavage site.

[0453] In some embodiments, the circRNA is linearized in the nucleus of a target cell. In some embodiments, linearization of a circRNA in the nucleus of a cell involves components present in the nucleus of the cell, e.g., to activate a cleavage event. For example, the B2 and ALU retrotransposons contain self-cleaving ribozymes whose activity is enhanced by interaction with the Polycomb protein, EZH2 (Hernandez et al. PNAS 117(1):415-425 (2020)). Thus, in some embodiments, a ribozyme, e.g., a ribozyme from a B2 or ALU element, that is responsive to a nuclear element, e.g., a nuclear protein, e.g., a genome-interacting protein, e.g., an epigenetic modifier, e.g., EZH2, is incorporated into a circRNA, e.g., of a gene modifying system. In some embodiments, nuclear localization of the circRNA results in an increase in autocatalytic activity of the ribozyme and linearization of the circRNA.

[0454] In some embodiments, the ribozyme is heterologous to one or more of the other components of the gene modifying system. In some embodiments, an inducible ribozyme (e.g., in a circRNA as described herein) is created synthetically, for example, by utilizing a protein ligand-responsive aptamer design. A system for utilizing the satellite RNA of tobacco ringspot virus hammerhead ribozyme with an MS2 coat protein aptamer has been described (Kennedy et al. Nucleic Acids Res 42(19):12306-12321 (2014), incorporated herein by reference in its entirety) that results in activation of the ribozyme activity in the presence of the MS2 coat protein. In embodiments, such a system responds to protein ligand localized to the cytoplasm or the nucleus. In some embodiments, the protein ligand is not MS2. Methods for generating RNA aptamers to target ligands have been described, for example, based on the systematic evolution of ligands by exponential enrichment (SELEX) (Tuerk and Gold, Science 249(4968):505-510 (1990); Ellington and Szostak, Nature 346(6287):818-822 (1990); the methods of each of which are incorporated herein by reference) and have, in some instances, been aided by in silico design (Bell et al. PNAS 117(15):8486-8493, the methods of which are incorporated herein by reference). Thus, in some embodiments, an aptamer for a target ligand is generated and incorporated into a synthetic ribozyme system, e.g., to trigger ribozyme-mediated cleavage and circRNA linearization, e.g., in the presence of the protein ligand. In some embodiments, circRNA linearization is triggered in the cytoplasm, e.g., using an aptamer that associates with a ligand in the cytoplasm. In some embodiments, circRNA linearization is triggered in the nucleus, e.g., using an aptamer that associates with a ligand in the nucleus. In embodiments, the ligand in the nucleus comprises an epigenetic modifier or a transcription factor. In some embodiments, the ligand that triggers linearization is present at higher levels in on-target cells than off-target cells.

[0455] It is further contemplated that a nucleic acid-responsive ribozyme system can be employed for circRNA linearization. For example, biosensors that sense defined target nucleic acid molecules to trigger ribozyme activation are described, e.g., in Penchovsky (Biotechnology Advances 32(5):1015-1027 (2014), incorporated herein by reference). By these methods, a ribozyme naturally folds into an inactive state and is only activated in the presence of a defined target nucleic acid molecule (e.g., an RNA molecule). In some embodiments, a circRNA of a gene modifying system comprises a nucleic acid-responsive ribozyme that is activated in the presence of a defined target nucleic acid, e.g., an RNA, e.g., an mRNA. In some embodiments, the nucleic acid that triggers linearization is present at higher levels in on-target cells than off-target cells.

[0456] In some embodiments of any of the aspects herein, a gene modifying system incorporates one or more ribozymes with inducible specificity to a target tissue or target cell of interest, e.g., a ribozyme that is activated by a ligand or nucleic acid present at higher levels in a target tissue or target cell of interest. In some embodiments, the gene modifying system incorporates a ribozyme with inducible specificity to a subcellular compartment, e.g., the nucleus, nucleolus, cytoplasm, or mitochondria. In some embodiments, the ribozyme that is activated by a ligand or nucleic acid present at higher levels in the target subcellular compartment. In some embodiments, an RNA component of a gene modifying system is provided as circRNA, e.g., that is activated by linearization. In some embodiments, linearization of a circRNA encoding a gene modifying polypeptide activates the molecule for translation. In some embodiments, a signal that activates a circRNA component of a gene modifying system is present at higher levels in on-target cells or tissues, e.g., such that the system is specifically activated in these cells.

[0457] In some embodiments, an RNA component of a gene modifying system is provided as a circRNA that is inactivated by linearization. In some embodiments, a circRNA encoding the gene modifying polypeptide is inactivated by cleavage and degradation. In some embodiments, a circRNA encoding the gene modifying polypeptide is inactivated by cleavage that separates a translation signal from the coding sequence of the polypeptide. In some embodiments, a signal that inactivates a circRNA component of a gene modifying system is present at higher levels in off-target cells or tissues, such that the system is specifically inactivated in these cells.

[0458] Further included here are compositions and methods for the assembly of full or partial template RNA molecules. In some embodiments, RNA molecules may be assembled by the connection of two or more (e.g., two, three, four, five, six, seven, eight, nine, ten, or more) RNA segments with each other. In an aspect, the disclosure provides methods for producing nucleic acid molecules, the methods comprising contacting two or more linear RNA segments with each other under conditions that allow for the 5′ terminus of a first RNA segment to be covalently linked with the 3′ terminus of a second RNA segment. In some embodiments, the joined molecule may be contacted with a third RNA segment under conditions that allow for the 5′ terminus of the joined molecule to be covalently linked with the 3′ terminus of the third RNA segment. In embodiments, the method further comprises joining a fourth, fifth, or additional RNA segments to the elongated molecule. This form of assembly may, in some instances, allow for rapid and efficient assembly of RNA molecules.

[0459] The disclosure also provides compositions and methods for the production of template RNA molecules with specificity for a gene modifying polypeptide. In an aspect, the method comprises: (1) identification of the target site and desired modification thereto, (2) production of RNA segments including a heterologous object sequence segment and a gene modifying polypeptide binding motif, and/or (3) connection of the four or more segments into at least one molecule, e.g., into a single RNA molecule. In some embodiments, some or all of the template RNA segments comprised in (2) are assembled into a template RNA molecule, e.g., one, two, three, or four of the listed components. In some embodiments, the segments comprised in (2) may be produced in further segmented molecules, e.g., split into at least 2, at least 3, at least 4, or at least 5 or more sub-segments, e.g., that are subsequently assembled, e.g., by one or more methods described herein.

[0460] In some embodiments, RNA segments may be produced by chemical synthesis. In some embodiments, RNA segments may be produced by in vitro transcription of a nucleic acid template, e.g., by providing an RNA polymerase to act on a cognate promoter of a DNA template to produce an RNA transcript. In some embodiments, in vitro transcription is performed using, e.g., a T7, T3, or SP6 RNA polymerase, or a derivative thereof, acting on a DNA, e.g., dsDNA, ssDNA, linear DNA, plasmid DNA, linear DNA amplicon, linearized plasmid DNA, e.g., encoding the RNA segment, e.g., under transcriptional control of a cognate promoter, e.g., a T7, T3, or SP6 promoter. In some embodiments, a combination of chemical synthesis and in vitro transcription is used to generate the RNA segments for assembly. In embodiments, the gene modifying polypeptide binding segments are produced by chemical synthesis and the heterologous object sequence segment is produced by in vitro transcription. Without wishing to be bound by theory, in vitro transcription may be better suited for the production of longer RNA molecules. In some embodiments, reaction temperature for in vitro transcription may be lowered, e.g., be less than 37° C. (e.g., between 0-10 C, 10-20 C, or 20-30 C), to result in a higher proportion of full-length transcripts (Krieg Nucleic Acid Res 18:6463 (1990)). In some embodiments, a protocol for improved synthesis of long transcripts is employed to synthesize a long template RNA, e.g., a template RNA greater than 5 kb, such as the use of e.g., T7 RiboMAX Express, which can generate 27 kb transcripts in vitro (Thiel et al. J Gen Virol 82(6):1273-1281 (2001)). In some embodiments, modifications to RNA molecules as described herein may be incorporated during synthesis of RNA segments (e.g., through the inclusion of modified nucleotides or alternative binding chemistries), following synthesis of RNA segments through chemical or enzymatic processes, following assembly of one or more RNA segments, or a combination thereof.

[0461] In some embodiments, an mRNA of the system (e.g., an mRNA encoding a gene modifying polypeptide) is synthesized in vitro using T7 polymerase-mediated DNA-dependent RNA transcription from a linearized DNA template, where UTP is optionally substituted with 1-methylpseudoUTP. In some embodiments, the transcript incorporates 5′ and 3′ UTRs, e.g., GGGAAAUAAGAGAGAAAAGAAGAGUAAGAAGAAAUAUAAGAGCCACC (SEQ ID NO: 15430) and UGAUAAUAGGCUGGAGCCUCGGUGGCCAUGCUUCUUGCCCCUUGGGCCUCCCCCC AGCCCCUCCUCCCCUUCCUGCACCCGUACCCCCGUGGUCUUUGAAUAAAGUCUGA (SEQ ID NO: 15431), or functional fragments or variants thereof, and optionally includes a poly-A tail, which can be encoded in the DNA template or added enzymatically following transcription. In some embodiments, a donor methyl group, e.g., S-adenosylmethionine, is added to a methylated capped RNA with cap 0 structure to yield a cap 1 structure that increases mRNA translation efficiency (Richner et al. Cell 168(6): P1114-1125 (2017)).

[0462] In some embodiments, the transcript from a T7 promoter starts with a GGG motif. In some embodiments, a transcript from a T7 promoter does not start with a GGG motif. It has been shown that a GGG motif at the transcriptional start, despite providing superior yield, may lead to T7 RNAP synthesizing a ladder of poly(G) products as a result of slippage of the transcript on the three C residues in the template strand from +1 to +3 (Imburgio et al. Biochemistry 39(34):10419-10430 (2000). For tuning transcription levels and altering the transcription start site nucleotides to fit alternative 5′ UTRs, the teachings of Davidson et al. Pac Symp Biocomput 433-443 (2010) describe T7 promoter variants, and the methods of discovery thereof, that fulfill both of these traits.

[0463] In some embodiments, RNA segments may be connected to each other by covalent coupling. In some embodiments, an RNA ligase, e.g., T4 RNA ligase, may be used to connect two or more RNA segments to each other. When a reagent such as an RNA ligase is used, a 5′ terminus is typically linked to a 3′ terminus. In some embodiments, if two segments are connected, then there are two possible linear constructs that can be formed (i.e., (1) 5′-Segment 1-Segment 2-3′ and (2) 5′-Segment 2-Segment 1-3′). In some embodiments, intramolecular circularization can also occur. Both of these issues can be addressed, for example, by blocking one 5′ terminus or one 3′ terminus so that RNA ligase cannot ligate the terminus to another terminus. In embodiments, if a construct of 5′-Segment 1-Segment 2-3′ is desired, then placing a blocking group on either the 5′ end of Segment 1 or the 3′ end of Segment 2 may result in the formation of only the correct linear ligation product and/or prevent intramolecular circularization. Compositions and methods for the covalent connection of two nucleic acid (e.g., RNA) segments are disclosed, for example, in US20160102322A1 (incorporated herein by reference in its entirety), along with methods including the use of an RNA ligase to directionally ligate two single-stranded RNA segments to each other.

[0464] One example of an end blocker that may be used in conjunction with, for example, T4 RNA ligase, is a dideoxy terminator. T4 RNA ligase typically catalyzes the ATP-dependent ligation of phosphodiester bonds between 5′-phosphate and 3′-hydroxyl termini. In some embodiments, when T4 RNA ligase is used, suitable termini must be present on the termini being ligated. One means for blocking T4 RNA ligase on a terminus comprises failing to have the correct terminus format. Generally, termini of RNA segments with a 5-hydroxyl or a 3′-phosphate will not act as substrates for T4 RNA ligase.

[0465] Additional exemplary methods that may be used to connect RNA segments is by click chemistry (e.g., as described in U.S. Pat. Nos. 7,375,234 and 7,070,941, and US Patent Publication No. 2013/0046084, the entire disclosures of which are incorporated herein by reference). For example, one exemplary click chemistry reaction is between an alkyne group and an azide group (see FIG. 11 of US20160102322A1, which is incorporated herein by reference in its entirety). Any click reaction may potentially be used to link RNA segments (e.g., Cu-azide-alkyne, strain-promoted-azide-alkyne, staudinger ligation, tetrazine ligation, photo-induced tetrazole-alkene, thiol-ene, NHS esters, epoxides, isocyanates, and aldehyde-aminooxy). In some embodiments, ligation of RNA molecules using a click chemistry reaction is advantageous because click chemistry reactions are fast, modular, efficient, often do not produce toxic waste products, can be done with water as a solvent, and/or can be set up to be stereospecific.

[0466] In some embodiments, RNA segments may be connected using an Azide-Alkyne Huisgen Cycloaddition. reaction, which is typically a 1,3-dipolar cycloaddition between an azide and a terminal or internal alkyne to give a 1,2,3-triazole for the ligation of RNA segments. Without wishing to be bound by theory, one advantage of this ligation method may be that this reaction can initiated by the addition of required Cu(I) ions. Other exemplary mechanisms by which RNA segments may be connected include, without limitation, the use of halogens (F—, Br—, I—)/alkynes addition reactions, carbonyls/sulfhydryls/maleimide, and carboxyl/amine linkages. For example, one RNA molecule may be modified with thiol at 3′ (using disulfide amidite and universal support or disulfide modified support), and the other RNA molecule may be modified with acrydite at 5′ (using acrylic phosphoramidite), then the two RNA molecules can be connected by a Michael addition reaction. This strategy can also be applied to connecting multiple RNA molecules stepwise. Also provided are methods for linking more than two (e.g., three, four, five, six, etc.) RNA molecules to each other. Without wishing to be bound by theory, this may be useful when a desired RNA molecule is longer than about 40 nucleotides, e.g., such that chemical synthesis efficiency degrades, e.g., as noted in US20160102322A1 (incorporated herein by reference in its entirety).

[0467] RNA molecules may be produced, for example, by processes such as in vitro transcription or chemical synthesis. In some embodiments, when chemical synthesis is used to produce such RNA molecules, they may be produced as a single synthesis product or by linking two or more synthesized RNA segments to each other. In embodiments, when three or more RNA segments are connected to each other, different methods may be used to link the individual segments together. Also, the RNA segments may be connected to each other in one pot (e.g., a container, vessel, well, tube, plate, or other receptacle), all at the same time, or in one pot at different times or in different pots at different times. In a non-limiting example, to assemble RNA Segments 1, 2 and 3 in numerical order, RNA Segments 1 and 2 may first be connected, 5′ to 3′, to each other. The reaction product may then be purified for reaction mixture components (e.g., by chromatography), then placed in a second pot, for connection of the 3′ terminus with the 5′ terminus of RNA Segment 3. The final reaction product may then be connected to the 5′ terminus of RNA Segment 3.

[0468] A number of additional linking chemistries may be used to connect RNA segments according to method of the invention. Some of these chemistries are set out in Table 6 of US20160102322A1, which is incorporated herein by reference in its entirety.

### Additional Template Features

[0469] In some embodiments, the template (e.g., template RNA) comprises certain structural features, e.g., determined in silico. In embodiments, the template RNA is predicted to have minimal energy structures between −280 and −480 kcal/mol (e.g., between −280 to −300, −300 to −350, −350 to −400, −400 to −450, or −450 to −480 kcal/mol), e.g., as measured by RNAstructure, e.g., as described in Turner and Mathews Nucleic Acids Res 38:D280-282 (2009) (incorporated herein by reference in its entirety).

[0470] In some embodiments, the template (e.g., template RNA) comprises certain structural features, e.g., determined in vitro. In embodiments, the template RNA is sequence optimized, e.g., to reduce secondary structure as determined in vitro, for example, by SHAPE-MaP (e.g., as described in Siegfried et al. Nat Methods 11:959-965 (2014); incorporated herein by reference in its entirety). In some embodiments, the template (e.g., template RNA) comprises certain structural features, e.g., determined in cells. In embodiments, the template RNA is sequence optimized, e.g., to reduce secondary structure as measured in cells, for example, by DMS-MaPseq (e.g., as described in Zubradt et al. Nat Methods 14:75-82 (2017); incorporated by reference herein in its entirety).

### Additional Functional Characteristics and Features of Gene Modifying Systems

[0471] A gene modifying system as described herein may, in some instances, be characterized by one or more functional measurements or characteristics. In some embodiments, the DNA binding domain has one or more of the functional characteristics described below. In some embodiments, the RNA binding domain has one or more of the functional characteristics described below. In some embodiments, the endonuclease domain has one or more of the functional characteristics described below. In some embodiments, the reverse transcriptase domain has one or more of the functional characteristics described below. In some embodiments, the template (e.g., template RNA) has one or more of the functional characteristics described below. In some embodiments, the target site bound by the gene modifying polypeptide has one or more of the functional characteristics described below.

### Gene Modifying Polypeptide

### DNA Binding Domain

[0472] In some embodiments, the DNA binding domain is capable of binding to a target sequence (e.g., a dsDNA target sequence) with greater affinity than a reference DNA binding domain. In some embodiments, the reference DNA binding domain is a DNA binding domain from R2_BM of B. mori. In some embodiments, the DNA binding domain is capable of binding to a target sequence (e.g., a dsDNA target sequence) with an affinity between 100 pM-10 nM (e.g., between 100 pM-1 nM or 1 nM-10 nM).

[0473] In some embodiments, the affinity of a DNA binding domain for its target sequence (e.g., dsDNA target sequence) is measured in vitro, e.g., by thermophoresis, e.g., as described in Asmari et al. Methods 146:107-119 (2018) (incorporated by reference herein in its entirety).

[0474] In embodiments, the DNA binding domain is capable of binding to its target sequence (e.g., dsDNA target sequence), e.g, with an affinity between 100 pM-10 nM (e.g., between 100 pM-1 nM or 1 nM-10 nM) in the presence of a molar excess of scrambled sequence competitor dsDNA, e.g., of about 100-fold molar excess.

[0475] In some embodiments, the DNA binding domain is found associated with its target sequence (e.g., dsDNA target sequence) more frequently than any other sequence in the genome of a target cell, e.g., human target cell, e.g., as measured by ChIP-seq (e.g., in HEK293T cells), e.g., as described in He and Pu (2010) Curr. Protoc Mol Biol Chapter 21 (incorporated herein by reference in its entirety). In some embodiments, the DNA binding domain is found associated with its target sequence (e.g., dsDNA target sequence) at least about 5-fold or 10-fold, more frequently than any other sequence in the genome of a target cell, e.g., as measured by ChIP-seq (e.g., in HEK293T cells), e.g., as described in He and Pu (2010), supra.

[0476] In some embodiments, a gene modifying polypeptide comprises a modification to a DNA-binding domain, e.g., relative to the wild-type polypeptide. In some embodiments, the DNA-binding domain comprises an addition, deletion, replacement, or modification to the amino acid sequence of the original DNA-binding domain. In some embodiments, the DNA-binding domain is modified to include a heterologous functional domain that binds specifically to a target nucleic acid (e.g., DNA) sequence of interest. In some embodiments, the functional domain replaces at least a portion (e.g., the entirety of) the prior DNA-binding domain of the polypeptide. In some embodiments, a gene modifying polypeptide comprises a modification to an endonuclease domain, e.g., relative to the wild-type polypeptide. In some embodiments, the endonuclease domain comprises an addition, deletion, replacement, or modification to the amino acid sequence of the original endonuclease domain. In some embodiments, the endonuclease domain is modified to include a heterologous functional domain that binds specifically to and/or induces endonuclease cleavage of a target nucleic acid (e.g., DNA) sequence of interest.

### RNA Binding Domain

[0477] In some embodiments, the RNA binding domain is capable of binding to a template RNA with greater affinity than a reference RNA binding domain. In some embodiments, the reference RNA binding domain is an RNA binding domain from R2_BM of B. mori. In some embodiments, the RNA binding domain is capable of binding to a template RNA with an affinity between 100 pM-10 nM (e.g., between 100 pM-1 nM or 1 nM-10 nM). In some embodiments, the affinity of a RNA binding domain for its template RNA is measured in vitro, e.g., by thermophoresis, e.g., as described in Asmari et al. Methods 146:107-119 (2018) (incorporated by reference herein in its entirety). In some embodiments, the affinity of a RNA binding domain for its template RNA is measured in cells (e.g., by FRET or CLIP-Seq).

[0478] In some embodiments, the RNA binding domain is associated with the template RNA in vitro at a frequency at least about 5-fold or 10-fold higher than with a scrambled RNA. In some embodiments, the frequency of association between the RNA binding domain and the template RNA or scrambled RNA is measured by CLIP-seq, e.g., as described in Lin and Miles (2019) Nucleic Acids Res 47(11):5490-5501 (incorporated by reference herein in its entirety). In some embodiments, the RNA binding domain is associated with the template RNA in cells (e.g., in HEK293T cells) at a frequency at least about 5-fold or 10-fold higher than with a scrambled RNA. In some embodiments, the frequency of association between the RNA binding domain and the template RNA or scrambled RNA is measured by CLIP-seq, e.g., as described in Lin and Miles (2019), supra.

### Endonuclease Domain

[0479] In some embodiments, the endonuclease domain is associated with the target dsDNA in vitro at a frequency at least about 5-fold or 10-fold higher than with a scrambled dsDNA. In some embodiments, the endonuclease domain is associated with the target dsDNA in vitro at a frequency at least about 5-fold or 10-fold higher than with a scrambled dsDNA, e.g., in a cell (e.g., a HEK293T cell). In some embodiments, the frequency of association between the endonuclease domain and the target DNA or scrambled DNA is measured by ChIP-seq, e.g., as described in He and Pu (2010) Curr. Protoc Mol Biol Chapter 21 (incorporated by reference herein in its entirety).

[0480] In some embodiments, the endonuclease domain can catalyze the formation of a nick at a target sequence, e.g., to an increase of at least about 5-fold or 10-fold relative to a non-target sequence (e.g., relative to any other genomic sequence in the genome of the target cell). In some embodiments, the level of nick formation is determined using NickSeq, e.g., as described in Elacqua et al. (2019) bioRxiv doi.org/10.1101/867937 (incorporated herein by reference in its entirety).

[0481] In some embodiments, the endonuclease domain is capable of nicking DNA in vitro. In embodiments, the nick results in an exposed base. In embodiments, the exposed base can be detected using a nuclease sensitivity assay, e.g., as described in Chaudhry and Weinfeld (1995) Nucleic Acids Res 23(19):3805-3809 (incorporated by reference herein in its entirety). In embodiments, the level of exposed bases (e.g., detected by the nuclease sensitivity assay) is increased by at least 10%, 50%, or more relative to a reference endonuclease domain. In some embodiments, the reference endonuclease domain is an endonuclease domain from R2_BM of B. mori.

[0482] In some embodiments, the endonuclease domain is capable of nicking DNA in a cell. In embodiments, the endonuclease domain is capable of nicking DNA in a HEK293T cell. In embodiments, an unrepaired nick that undergoes replication in the absence of Rad51 results in increased NHEJ rates at the site of the nick, which can be detected, e.g., by using a Rad51 inhibition assay, e.g., as described in Bothmer et al. (2017) Nat Commun 8:13905 (incorporated by reference herein in its entirety). In embodiments, NHEJ rates are increased above 0-5%. In embodiments, NHEJ rates are increased to 20-70% (e.g., between 30%-60% or 40-50%), e.g., upon Rad51 inhibition.

[0483] In some embodiments, the endonuclease domain releases the target after cleavage. In some embodiments, release of the target is indicated indirectly by assessing for multiple turnovers by the enzyme, e.g., as described in Yourik at al. RNA 25(1):35-44 (2019) (incorporated herein by reference in its entirety) and shown in FIG. 2. In some embodiments, the kₑₓₚ of an endonuclease domain is 1×10⁻³-1×10⁻⁵ min−1 as measured by such methods.

[0484] In some embodiments, the endonuclease domain has a catalytic efficiency (k_{cat}/Kₘ) greater than about 1×10⁸ s⁻¹ M⁻¹ in vitro. In embodiments, the endonuclease domain has a catalytic efficiency greater than about 1×10⁵, 1×10⁶, 1×10⁷, or 1×10⁸, s⁻¹ M⁻¹ in vitro. In embodiments, catalytic efficiency is determined as described in Chen et al. (2018) Science 360(6387):436-439 (incorporated herein by reference in its entirety). In some embodiments, the endonuclease domain has a catalytic efficiency (k_{cat}/Kₘ) greater than about 1×10⁸ s⁻¹ M⁻¹ in cells. In embodiments, the endonuclease domain has a catalytic efficiency greater than about 1×10⁵, 1×10⁶, 1×10⁷, or 1×10⁸ s⁻¹ M⁻¹ in cells.

### Reverse Transcriptase Domain

[0485] In some embodiments, the reverse transcriptase domain has a lower probability of premature termination rate (P_{off}) in vitro relative to a reference reverse transcriptase domain. In some embodiments, the reference reverse transcriptase domain is a reverse transcriptase domain from R2_BM of B. mori or a viral reverse transcriptase domain, e.g., the RT domain from M-MLV.

[0486] In some embodiments, the reverse transcriptase domain has a lower probability of premature termination rate (P_{off}) in vitro of less than about 5×10⁻³/nt, 5×10⁻⁴/nt, or 5×10⁻⁶/nt, e.g., as measured on a 1094 nt RNA. In embodiments, the in vitro premature termination rate is determined as described in Bibillo and Eickbush (2002) J Biol Chem 277(38):34836-34845 (incorporated by reference herein its entirety).

[0487] In some embodiments, the reverse transcriptase domain is able to complete at least about 30% or 50% of integrations in cells. The percent of complete integrations can be measured by dividing the number of substantially full-length integration events (e.g., genomic sites that comprise at least 98% of the expected integrated sequence) by the number of total (including substantially full-length and partial) integration events in a population of cells. In embodiments, the integrations in cells is determined (e.g., across the integration site) using long-read amplicon sequencing, e.g., as described in Karst et al. (2020) bioRxiv doi.org/10.1101/645903 (incorporated by reference herein its in entirety).

[0488] In embodiments, quantifying integrations in cells comprises counting the fraction of integrations that contain at least about 75%, 80%, 85%, 90%, 95%, 96%, 97%, 98%, 99%, or 100% of the DNA sequence corresponding to the template RNA (e.g., a template RNA having a length of at least 0.05, 0.1, 0.5, 0.6, 0.7, 0.8, 0.9, 1, 1.5, 2, 3, 4, or 5 kb, e.g., a length between 0.5-0.6, 0.6-0.7, 0.7-0.8, 0.8-0.9, 1.0-1.2, 1.2-1.4, 1.4-1.6, 1.6-1.8, 1.8-2.0, 2-3, 3-4, or 4-5 kb).

[0489] In some embodiments, the reverse transcriptase domain is capable of polymerizing dNTPs in vitro. In embodiments, the reverse transcriptase domain is capable of polymerizing dNTPs in vitro at a rate between 0.1-50 nt/sec (e.g., between 0.1-1, 1-10, or 10-50 nt/sec). In embodiments, polymerization of dNTPs by the reverse transcriptase domain is measured by a single-molecule assay, e.g., as described in Schwartz and Quake (2009) PNAS 106(48):20294-20299 (incorporated by reference in its entirety).

[0490] In some embodiments, the reverse transcriptase domain has an in vitro error rate (e.g., misincorporation of nucleotides) of between 1×10⁻³-1×10⁻⁴ or 1×10⁻⁴-1×10⁻⁵ substitutions/nt, e.g., as described in Yasukawa et al. (2017) Biochem Biophys Res Commun 492(2):147-153 (incorporated herein by reference in its entirety). In some embodiments, the reverse transcriptase domain has an error rate (e.g., misincorporation of nucleotides) in cells (e.g., HEK293T cells) of between 1×10⁻³-1×10⁻⁴ or 1×10⁻⁴-1×10⁻⁵ substitutions/nt, e.g., by long-read amplicon sequencing, e.g., as described in Karst et al. (2020) bioRxiv doi.org/10.1101/645903 (incorporated by reference herein in its entirety).

[0491] In some embodiments, the reverse transcriptase domain is capable of performing reverse transcription of a target RNA in vitro. In some embodiments, the reverse transcriptase requires a primer of at least 3 nt to initiate reverse transcription of a template. In some embodiments, reverse transcription of the target RNA is determined by detection of cDNA from the target RNA (e.g., when provided with a ssDNA primer, e.g., which anneals to the target with at least 3, 4, 5, 6, 7, 8, 9, or 10 nt at the 3′ end), e.g., as described in Bibillo and Eickbush (2002) J Biol Chem 277(38):34836-34845 (incorporated herein by reference in its entirety).

[0492] In some embodiments, the reverse transcriptase domain performs reverse transcription at least 5 or 10 times more efficiently (e.g., by cDNA production), e.g., when converting its RNA template to cDNA, for example, as compared to an RNA template lacking the protein binding motif (e.g., a 3′ UTR). In embodiments, efficiency of reverse transcription is measured as described in Yasukawa et al. (2017) Biochem Biophys Res Commun 492(2):147-153 (incorporated by reference herein in its entirety).

[0493] In some embodiments, the reverse transcriptase domain specifically binds a specific RNA template with higher frequency (e.g., about 5 or 10-fold higher frequency) than any endogenous cellular RNA, e.g., when expressed in cells (e.g., HEK293T cells). In embodiments, frequency of specific binding between the reverse transcriptase domain and the template RNA are measured by CLIP-seq, e.g., as described in Lin and Miles (2019) Nucleic Acids Res 47(11):5490-5501 (incorporated herein by reference in its entirety).

### Target Site and Integration

[0494] In some embodiments, after gene editing, the target site surrounding the integrated sequence contains a limited number of insertions or deletions, for example, in less than about 50% or 10% of integration events, e.g., as determined by long-read amplicon sequencing of the target site, e.g., as described in Karst et al. (2020) bioRxiv doi.org/10.1101/645903 (incorporated by reference herein in its entirety). In some embodiments, the target site does not show multiple insertion events, e.g., head-to-tail or head-to-head duplications, e.g., as determined by long-read amplicon sequencing of the target site, e.g., as described in Karst et al. bioRxiv doi.org/10.1101/645903 (2020) (incorporated herein by reference in its entirety). In some embodiments, the target site contains an integrated sequence corresponding to the template RNA. In some embodiments, the target site does not contain insertions resulting from endogenous RNA in more than about 1% or 10% of events, e.g., as determined by long-read amplicon sequencing of the target site, e.g., as described in Karst et al. bioRxiv doi.org/10.1101/645903 (2020) (incorporated herein by reference in its entirety). In some embodiments, the target site contains the integrated sequence corresponding to the template RNA.

[0495] In some embodiments, the target site contains an integrated sequence corresponding to the template RNA. In embodiments, the target site does not comprise sequence outside of the template, e.g., as determined by long-read amplicon sequencing of the target site (for example, as described in Karst et al. bioRxiv doi.org/10.1101/645903 (2020); incorporated herein by reference in its entirety).

[0496] In some embodiments, the heterologous object sequence is integrated upstream of a gene (e.g., within 2 kb or 10 kb of a transcription start site (TSS)), within a coding portion of a gene (e.g., an exon), within a non-coding portion of a gene (e.g., an intron), or an intergenic location (e.g., downstream of a gene). In some embodiments, within a plurality of cells containing a plurality of copies of a gene encoded by the heterologous object sequence, less than or equal to 70%, 65%, 60%, or 55% of copies of the heterologous object sequence (e.g., gene encoding a CAR) are situated within a gene endogenous to a cell of the population. In some embodiments, less than 10%, 9%, 8%, 7%, 6%, or 5% of copies of the heterologous object sequence (e.g., gene encoding a CAR) are situated within an exon of a gene endogenous to a cell of the population. In some embodiments, less than 10%, 9%, 8%, 7%, 6%, or 5% of copies of the heterologous object sequence (e.g., gene encoding a CAR) are situated within a coding region of a gene endogenous to a cell of the population. In some embodiments, less than 70%, 65%, 60%, 55%, or 50% of copies of the heterologous object sequence (e.g., gene encoding a CAR) are situated within an intron of a gene endogenous to a cell of the population. In some embodiments, less than 70%, 65%, 60%, 55%, or 50% of copies of the heterologous object sequence (e.g., gene encoding a CAR) are situated within a non-coding region of a gene endogenous to a cell of the population. In some embodiments, less than 10%, 9%, 8%, or 7% of copies of the heterologous object sequence (e.g., gene encoding a CAR) are situated upstream of a gene (e.g., within 2 kb of a transcriptional start site (TSS)) endogenous to a cell of the population. In some embodiments, at least 20%, 25%, 30%, 35%, or 40% of copies of the heterologous object sequence (e.g., gene encoding a CAR) are situated within an intergenic region endogenous to a cell of the population. In some embodiments, at least 20%, 25%, 30%, 35%, or 40% of copies of the heterologous object sequence (e.g., gene encoding a CAR) are situated downstream of a gene endogenous to a cell of the population.

[0497] In some embodiments, modifying a genome of a cell using a gene modifying system described herein results in a higher level of insertions in an intergenic location compared to a lentiviral system. Without wishing to be bound by theory, the integration pattern of the gene modifying systems is advantageous because, in some embodiments, it is desired to reduce disrupting expression of endogenous genes in the host cell.

### DNA Damage Response

[0498] In some embodiments, modifying a genome of a cell (e.g., a primary cell, e.g., a T cell or an IPSC) using a gene modifying system does not result in activation of the endogenous DNA damage response (DDR) pathway. In some embodiments, modifying a genome of a cell (e.g., a primary cell, e.g., an IPSC) using a gene modifying system results in activation of the cell's endogenous DDR pathway less than in an otherwise similar cell treated with Cas9, e.g., in an assay according to Example 2.

[0499] In some embodiments, modifying a genome of a cell (e.g., a primary cell, e.g., a T cell or an IPSC) using a gene modifying system does not result in activation of the endogenous interferon response. In some embodiments, modifying a genome of a cell (e.g., a primary cell, e.g., a T cell or an IPSC) using a gene modifying system results in activation of the cell's interferon response less than in an otherwise similar cell treated with a gene modifying system comprising elements from a LINE-1 retrotransposase, e.g., in an assay according to Example 3.

### Self-Inactivating Modules for Regulating Gene Modifying Activity

[0500] In some embodiments, the gene modifying polypeptide systems described herein includes a self-inactivating module. The self-inactivating module leads to a decrease of expression of the gene modifying polypeptide, the gene modifying template, or both. Without wishing to be bound by the theory, the self-inactivating module provides for a temporary period of gene modifying polypeptide expression prior to inactivation. Without wishing to be bound by theory, the activity of the gene modifying polypeptide at a target site introduces a mutation (e.g. a substitution, insertion, or deletion) into the DNA encoding the gene modifying polypeptide or gene modifying template which results in a decrease of gene modifying polypeptide or template expression. In some embodiments of the self-inactivating module, a target site for the gene modifying polypeptide is included in the DNA encoding the gene modifying polypeptide or gene modifying template. In some embodiments, one, two, three, four, five, or more copies of the target site are included in the DNA encoding the gene modifying polypeptide or gene modifying template. In some embodiments, the target site in the DNA encoding the gene modifying polypeptide or gene modifying template is the same target site as the target site on the genome. In some embodiments, the target site is a different target site than the target site on the genome. In some embodiments, the self-inactivation module target site uses the same or a different template RNA as the genome target site. In some embodiments, the target side is nicked. The target site may be incorporated into an enhancer, a promoter, an untranslated region, an exon, an intron, an open reading frame, or a stuffer sequence.

[0501] In some embodiments, upon inactivation, the decrease of expression is 25%, 50%, 60%, 70%, 80%, 90%, 95%, 99%, 99.9%, or more lower than a gene modifying system that does not contain the self-inactivating module. In some embodiments, a gene modifying system that contains the self-inactivating module has a 5%, 10%, 15%, 20%, 25%, 30%, 40%, 50%, 60%, 70%, 80%, 90%, 95% 99%, or higher rate of integrations in target sites than off-target sites compared to a gene modifying system that does not contain the self-inactivation module. A gene modifying system that contains the self-inactivating module has a 10%, 15%, 20%, 25%, 30%, 40%, 50%, 60%, 70%, 80%, 90%, 95% 99%, or higher efficiency of target site modification compared to a gene modifying system that does not contain the self-inactivation module. In some embodiments, the self-inactivating module is included when the gene modifying polypeptide is delivered as DNA, e.g. via a viral vector.

[0502] Self-inactivating modules have been described for nucleases. See, e.g. in Li et al A Self-Deleting AAV-CRISPR System for In Vivo Genome Editing, Mol Ther Methods Clin Dev. 2019 Mar. 15; 12: 111-122, P. Singhal, Self-Inactivating Cas9: a method for reducing exposure while maintaining efficacy in virally delivered Cas9 applications (available at editasmedicine.com/wp-content/uploads/2019/10/aef_asgct_poster_2017_final_-_present_5-11-17_515pm1_1494537387_1494558495_1497467403.pdf), and Epstein and Schaffer Engineering a Self-Inactivating CRISPR System for AAV Vectors Targeted Genome Editing I|Volume 24, SUPPLEMENT 1, S50, May 1, 2016, and WO2018106693A1.

### Small Molecules

[0503] In some embodiments a polypeptide described herein (e.g., a gene modifying polypeptide) is controllable via a small molecule. In some embodiments, the polypeptide is dimerized via a small molecule.

[0504] In some embodiment, the polypeptide is controllable via Chemical Induction of Dimerization (CID) with small molecules. CID is generally used to generate switches of protein function to alter cell physiology. An exemplary high specificity, efficient dimerizer is rimiducid (AP1903), which has two identical, protein-binding surfaces arranged tail-to-tail, each with high affinity and specificity for a mutant of FKBP12: FKBP12(F36V) (FKBP12v36, F_{V36} or Fᵥ), Attachment of one or more F_{V} domains onto one or more cell signaling molecules that normally rely on homodimerization can convert that protein to rimiducid control. Homodimerization with rimiducid is used in the context of an inducible caspase safety switch. This molecular switch that is controlled by a distinct dimerizer ligand, based on the heterodimerizing small molecule, rapamycin, or rapamycin analogs (“rapalogs”). Rapamycin binds to FKBP12, and its variants, and can induce heterodimerization of signaling domains that are fused to FKBP12 by binding to both FKBP12 and to polypeptides that contain the FKBP-rapamycin-binding (FRB) domain of mTOR. Provided in some embodiments of the present application are molecular switches that greatly augment the use of rapamycin, rapalogs and rimiducid as agents for therapeutic applications.

[0505] In some embodiments of the dual switch technology, a homodimerizer, such as AP1903 (rimiducid), directly induces dimerization or multimerization of polypeptides comprising an FKBP12 multimerizing region. In other embodiments, a polypeptide comprising an FKBP12 multimerization is multimerized, or aggregated by binding to a heterodimerizer, such as rapamycin or a rapalog, which also binds to an FRB or FRB variant multimerizing region on a chimeric polypeptide, also expressed in the modified cell, such as, for example, a chimeric antigen receptor. Rapamycin is a natural product macrolide that binds with high affinity (<1 nM) to FKBP12 and together initiates the high-affinity, inhibitory interaction with the FKBP-Rapamycin-Binding (FRB) domain of mTOR. FRB is small (89 amino acids) and can thereby be used as a protein “tag” or “handle” when appended to many proteins. Coexpression of a FRB-fused protein with a FKBP12-fused protein renders their approximation rapamycin-inducible (12-16). This can serve as the basis for a cell safety switch regulated by the orally available ligand, rapamycin, or derivatives of rapamycin (rapalogs) that do not inhibit mTOR at a low, therapeutic dose but instead bind with selected, Caspase-9-fused mutant FRB domains. (see Sabatini D M, et al., Cell. 1994; 78(1):35-43; Brown E J, et al., Nature. 1994; 369(6483):756-8; Chen J, et al., Proc Natl Acad Sci USA. 1995; 92(11):4947-51; and Choi J, Science. 1996; 273(5272):239-42).

[0506] In some embodiments, two levels of control are provided in the therapeutic cells. In embodiments, the first level of control may be tunable, i.e., the level of removal of the therapeutic cells may be controlled so that it results in partial removal of the therapeutic cells. In some embodiments, the chimeric antigen polypeptide comprises a binding site for rapamycin, or a rapamycin analog. In embodiments, also present in the therapeutic cell is a suicide gene, such as, for example, one encoding a caspase polypeptide. Using this controllable first level, the need for continued therapy may, in some embodiments, be balanced with the need to eliminate or reduce the level of negative side effects. In some embodiments, a rapamycin analog, a rapalog is administered to the patient, which then binds to both the caspase polypeptide and the chimeric antigen receptor, thus recruiting the caspase polypeptide to the location of the CAR, and aggregating the caspase polypeptide. Upon aggregation, the caspase polypeptide induces apoptosis. The amount of rapamycin or rapamycin analog administered to the patient may vary; if the removal of a lower level of cells by apoptosis is desired in order to reduce side effects and continue CAR therapy, a lower level of rapamycin or rapamycin may be administered to the patient. In some embodiments, the second level of control may be designed to achieve the maximum level of cell elimination. This second level may be based, for example, on the use of rimiducid, or AP1903. If there is a need to rapidly eliminate up to 100% of the therapeutic cells, the AP1903 may be administered to the patient. The multimeric AP1903 binds to the caspase polypeptide, leading to multimerization of the caspase polypeptide and apoptosis. In certain examples, second level may also be tunable, or controlled, by the level of AP1903 administered to the subject.

[0507] In certain embodiments, small molecules can be used to control genes, as described in for example, U.S. Ser. No. 10/584,351 at 47:53-56:47 (incorporated by reference herein in its entirety), together suitable ligands for the control features, e.g., in U.S. Ser. No. 10/584,351 at 56:48, et seq. as well as U10046049 at 43:27-52:20, incorporated by reference as well as the description of ligands for such control systems at 52:21, et seq.

### Chemically Modified Nucleic Acids and Nucleic Acid End Features

[0508] A nucleic acid described herein (e.g., a template nucleic acid, e.g., a template RNA; or a nucleic acid (e.g., mRNA) encoding a gene modifying polypeptide) can comprise unmodified or modified nucleobases. Naturally occurring RNAs are synthesized from four basic ribonucleotides: ATP, CTP, UTP and GTP, but may contain post-transcriptionally modified nucleotides. Further, approximately one hundred different nucleoside modifications have been identified in RNA (Rozenski, J, Crain, P, and McCloskey, J. (1999). The RNA Modification Database: 1999 update. Nucl Acids Res 27: 196-197). An RNA can also comprise wholly synthetic nucleotides that do not occur in nature.

[0509] In some embodiments, the chemically modification is one provided in PCT/US2016/032454, US Pat. Pub. No. 20090286852, of International Application No. WO/2012/019168, WO/2012/045075, WO/2012/135805, WO/2012/158736, WO/2013/039857, WO/2013/039861, WO/2013/052523, WO/2013/090648, WO/2013/096709, WO/2013/101690, WO/2013/106496, WO/2013/130161, WO/2013/151669, WO/2013/151736, WO/2013/151672, WO/2013/151664, WO/2013/151665, WO/2013/151668, WO/2013/151671, WO/2013/151667, WO/2013/151670, WO/2013/151666, WO/2013/151663, WO/2014/028429, WO/2014/081507, WO/2014/093924, WO/2014/093574, WO/2014/113089, WO/2014/144711, WO/2014/144767, WO/2014/144039, WO/2014/152540, WO/2014/152030, WO/2014/152031, WO/2014/152027, WO/2014/152211, WO/2014/158795, WO/2014/159813, WO/2014/164253, WO/2015/006747, WO/2015/034928, WO/2015/034925, WO/2015/038892, WO/2015/048744, WO/2015/051214, WO/2015/051173, WO/2015/051169, WO/2015/058069, WO/2015/085318, WO/2015/089511, WO/2015/105926, WO/2015/164674, WO/2015/196130, WO/2015/196128, WO/2015/196118, WO/2016/011226, WO/2016/011222, WO/2016/011306, WO/2016/014846, WO/2016/022914, WO/2016/036902, WO/2016/077125, or WO/2016/077123, each of which is herein incorporated by reference in its entirety. It is understood that incorporation of a chemically modified nucleotide into a polynucleotide can result in the modification being incorporated into a nucleobase, the backbone, or both, depending on the location of the modification in the nucleotide. In some embodiments, the backbone modification is one provided in EP 2813570, which is herein incorporated by reference in its entirety. In some embodiments, the modified cap is one provided in US Pat. Pub. No. 20050287539, which is herein incorporated by reference in its entirety.

[0510] In some embodiments, the chemically modified nucleic acid (e.g., RNA, e.g., mRNA) comprises one or more of ARCA: anti-reverse cap analog (m27.3′-OGP3G), GP3G (Unmethylated Cap Analog), m7GP3G (Monomethylated Cap Analog), m32.2.7GP3G (Trimethylated Cap Analog), m5CTP (5′-methyl-cytidine triphosphate), m6ATP (N6-methyl-adenosine-5′-triphosphate), s2UTP (2-thio-uridine triphosphate), and Ψ (pseudouridine triphosphate).

[0511] In some embodiments, the chemically modified nucleic acid comprises a 5′ cap, e.g.: a 7-methylguanosine cap (e.g., a 0-Me-m7G cap); a hypermethylated cap analog; an NAD+-derived cap analog (e.g., as described in Kiledjian, Trends in Cell Biology 28, 454-464 (2018)); or a modified, e.g., biotinylated, cap analog (e.g., as described in Bednarek et al., Phil Trans R Soc B 373, 20180167 (2018)).

[0512] In some embodiments, the chemically modified nucleic acid comprises a 3′ feature selected from one or more of: a polyA tail; a 16-nucleotide long stem-loop structure flanked by unpaired 5 nucleotides (e.g., as described by Mannironi et al., Nucleic Acid Research 17, 9113-9126 (1989)); a triple-helical structure (e.g., as described by Brown et al., PNAS 109, 19202-19207 (2012)); a tRNA, Y RNA, or vault RNA structure (e.g., as described by Labno et al., Biochemica et Biophysica Acta 1863, 3125-3147 (2016)); incorporation of one or more deoxyribonucleotide triphosphates (dNTPs), 2′O-Methylated NTPs, or phosphorothioate-NTPs; a single nucleotide chemical modification (e.g., oxidation of the 3′ terminal ribose to a reactive aldehyde followed by conjugation of the aldehyde-reactive modified nucleotide); or chemical ligation to another nucleic acid molecule.

[0513] In some embodiments, the nucleic acid (e.g., template nucleic acid or nucleic acid encoding the gene modifying polypeptide) comprises one or more modified nucleotides, e.g., selected from dihydrouridine, inosine, 7-methylguanosine, 5-methylcytidine (5mC), 5′ Phosphate ribothymidine, 2′-O-methyl ribothymidine, 2′-O-ethyl ribothymidine, 2′-fluoro ribothymidine, C-5 propynyl-deoxycytidine (pdC), C-5 propynyl-deoxyuridine (pdU), C-5 propynyl-cytidine (pC), C-5 propynyl-uridine (pU), 5-methyl cytidine, 5-methyl uridine, 5-methyl deoxycytidine, 5-methyl deoxyuridine methoxy, 2,6-diaminopurine, 5′-Dimethoxytrityl-N4-ethyl-2′-deoxycytidine, C-5 propynyl-f-cytidine (pfC), C-5 propynyl-f-uridine (pfU), 5-methyl f-cytidine, 5-methyl f-uridine, C-5 propynyl-m-cytidine (pmC), C-5 propynyl-f-uridine (pmU), 5-methyl m-cytidine, 5-methyl m-uridine, LNA (locked nucleic acid), MGB (minor groove binder) pseudouridine (Ψ), 1-N-methylpseudouridine (1-Me-Ψ), or 5-methoxyuridine (5-MO-U).

[0514] In some embodiments, the nucleic acid comprises a backbone modification, e.g., a modification to a sugar or phosphate group in the backbone. In some embodiments, the nucleic acid comprises a nucleobase modification.

[0515] In some embodiments, the nucleic acid comprises one or more chemically modified nucleotides of Table M1, one or more chemical backbone modifications of Table M2, one or more chemically modified caps of Table M3. For instance, in some embodiments, the nucleic acid comprises two or more (e.g., 3, 4, 5, 6, 7, 8, 9, or 10 or more) different types of chemical modifications. As an example, the nucleic acid may comprise two or more (e.g., 3, 4, 5, 6, 7, 8, 9, or 10 or more) different types of modified nucleobases, e.g., as described herein, e.g., in Table M1. Alternatively or in combination, the nucleic acid may comprise two or more (e.g., 3, 4, 5, 6, 7, 8, 9, or 10 or more) different types of backbone modifications, e.g., as described herein, e.g., in Table M2. Alternatively or in combination, the nucleic acid may comprise one or more modified cap, e.g., as described herein, e.g., in Table M3. For instance, in some embodiments, the nucleic acid comprises one or more type of modified nucleobase and one or more type of backbone modification; one or more type of modified nucleobase and one or more modified cap; one or more type of modified cap and one or more type of backbone modification; or one or more type of modified nucleobase, one or more type of backbone modification, and one or more type of modified cap.

[0516] In some embodiments, the nucleic acid comprises one or more (e.g., 2, 3, 4, 5, 6, 7, 8, 9, 10, 20, 30, 40, 50, 60, 70, 80, 90, 100, 150, 200, 250, 300, 350, 400, 450, 500, 600, 700, 800, 900, 1000, or more) modified nucleobases. In some embodiments, all nucleobases of the nucleic acid are modified. In some embodiments, the nucleic acid is modified at one or more (e.g., 2, 3, 4, 5, 6, 7, 8, 9, 10, 20, 30, 40, 50, 60, 70, 80, 90, 100, 150, 200, 250, 300, 350, 400, 450, 500, 600, 700, 800, 900, 1000, or more) positions in the backbone. In some embodiments, all backbone positions of the nucleic acid are modified.

TABLE M1
Modified nucleotides

| | |
|---|---|
| 5-aza-uridine | N2-methyl-6-thio-guanosine |
| 2-thio-5-aza-midine | N2,N2-dimethyl-6-thio-guanosine |
| 2-thiouridine | pyridin-4-one ribonucleoside |
| 4-thio-pseudouridine | 2-thio-5-aza-uridine |
| 2-thio-pseudouridine | 2-thiomidine |
| 5-hydroxyuridine | 4-thio-pseudomidine |
| 3-methyluridine | 2-thio-pseudowidine |
| 5-carboxymethyl-uridine | 3-methylmidine |
| 1-carboxymethyl-pseudouridine | 1-propynyl-pseudomidine |
| 5-propynyl-uridine | 1-methyl-1-deaza-pseudomidine |
| 1-propynyl-pseudouridine | 2-thio-1-methyl-1-deaza-pseudouridine |
| 5-taurinomethyluridine | 4-methoxy-pseudomidine |
| 1-taurinomethyl-pseudouridine | 5′-O-(1-Thiophosphate)-Adenosine |
| 5-taurinomethyl-2-thio-uridine | 5′-O-(1-Thiophosphate)-Cytidine |
| 1-taurinomethyl-4-thio-uridine | 5′-O-(1-thiophosphate)-Guanosine |
| 5-methyl-uridine | 5′-O-(1-Thiophophate)-Uridine |
| 1-methyl-pseudouridine | 5′-O-(1-Thiophosphate)-Pseudouridine |
| 4-thio-1-methyl-pseudouridine | 2′-O-methyl-Adenosine |
| 2-thio-1-methyl-pseudouridine | 2′-O-methyl-Cytidine |
| 1-methyl-1-deaza-pseudouridine | 2′-O-methyl-Guanosine |
| 2-thio-1-methyl-1-deaza-pseudomidine | 2′-O-methyl-Uridine |
| dihydrouridine | 2′-O-methyl-Pseudouridine |
| dihydropseudouridine | 2′-O-methyl-Inosine |
| 2-thio-dihydromidine | 2-methyladenosine |
| 2-thio-dihydropseudouridine | 2-methylthio-N6-methyladenosine |
| 2-methoxyuridine | 2-methylthio-N6 isopentenyladenosine |
| 2-methoxy-4-thio-uridine | 2-methylthio-N6-(cis- |
| 4-methoxy-pseudouridine | hydroxyisopentenyl)adenosine |
| 4-methoxy-2-thio-pseudouridine | N6-methyl-N6-threonylcarbamoyladenosine |
| 5-aza-cytidine | N6-hydroxynorvalylcarbamoyladenosine |
| pseudoisocytidine | 2-methylthio-N6-hydroxynorvalyl |
| 3-methyl-cytidine | carbamoyladenosine |
| N4-acetylcytidine | 2′-O-ribosyladenosine (phosphate) |
| 5-formylcytidine | 1,2′-O-dimethylinosine |
| N4-methylcytidine | 5,2′-O-dimethylcytidine |
| 5-hydroxymethylcytidine | N4-acetyl-2′-O-methylcytidine |
| 1-methyl-pseudoisocytidine | Lysidine |
| pyrrolo-cytidine | 7-methylguanosine |
| pyrrolo-pseudoisocytidine | N2,2′-O-dimethylguanosine |
| 2-thio-cytidine | N2,N2,2′-O-trimethylguanosine |
| 2-thio-5-methyl-cytidine | 2′-O-ribosylguanosine (phosphate) |
| 4-thio-pseudoisocytidine | Wybutosine |
| 4-thio-1-methyl-pseudoisocytidine | Peroxywybutosine |
| 4-thio-1-methyl-1-deaza-pseudoisocytidine | Hydroxywybutosine |
| 1-methyl-1-deaza-pseudoisocytidine | undermodified hydroxywybutosine |
| zebularine | methylwyosine |
| 5-aza-zebularine | queuosine |
| 5-methyl-zebularine | epoxyqueuosine |
| 5-aza-2-thio-zebularine | galactosyl-queuosine |
| 2-thio-zebularine | mannosyl-queuosine |
| 2-methoxy-cytidine | 7-cyano-7-deazaguanosine |
| 2-methoxy-5-methyl-cytidine | 7-aminomethyl-7-deazaguanosine |
| 4-methoxy-pseudoisocytidine | archaeosine |
| 4-methoxy-1-methyl-pseudoisocytidine | 5,2′-O-dimethyluridine |
| 2-aminopurine | 4-thiouridine |
| 2,6-diaminopurine | 5-methyl-2-thiouridine |
| 7-deaza-adenine | 2-thio-2′-O-methyluridine |
| 7-deaza-8-aza-adenine | 3-(3-amino-3-carboxypropyl)uridine |
| 7-deaza-2-aminopurine | 5-methoxyuridine |
| 7-deaza-8-aza-2-aminopurine | uridine 5-oxyacetic acid |
| 7-deaza-2,6- diaminopurine | uridine 5-oxyacetic acid methyl ester |
| 7-deaza-8-aza-2,6-diarninopurine | 5-(carboxyhydroxymethyl)uridine) |
| 1-methyladenosine | 5-(carboxyhydroxymethyl)uridine methyl ester |
| N6-isopentenyladenosine | 5-methoxycarbonylmethyluridine |
| N6-(cis-hydroxyisopentenyl)adenosine | 5-methoxycarbonylmethyl-2′-O-methyluridine |
| 2-methylthio-N6-(cis-hydroxyisopentenyl) | 5-methoxycarbonylmethyl-2-thiouridine |
| adenosine | 5-aminomethyl-2-thiouridine |
| N6-glycinylcarbamoyladenosine | 5-methylaminomethyluridine |
| N6-threonylcarbamoyladenosine | 5-methylaminomethyl-2-thiouridine |
| 2-methylthio-N6-threonyl | 5-methylaminomethyl-2-selenouridine |
| carbamoyladenosine | 5-carbamoylmethyluridine |
| N6,N6-dimethyladenosine | 5-carbamoylmethyl-2′-O-methyluridine |
| 7-methyladenine | 5-carboxymethylaminomethyluridine |
| 2-methylthio-adenine | 5-carboxymethylaminomethyl-2′-O- |
| 2-methoxy-adenine | methyluridine |
| inosine | 5-carboxymethylaminomethyl-2-thiouridine |
| 1-methyl-inosine | N4,2′-O-dimethylcytidine |
| wyosine | 5-carboxymethyluridine |
| wybutosine | N6,2′-O-dimethyladenosine |
| 7-deaza-guanosine | N,N6,O-2′-trimethyladenosine |
| 7-deaza-8-aza-guanosine | N2,7-dimethylguanosine |
| 6-thio-guanosine | N2,N2,7-trimethylguanosine |
| 6-thio-7-deaza-guanosine | 3,2′-O-dimethyluridine |
| 6-thio-7-deaza-8-aza-guanosine | 5-methyldihydrouridine |
| 7-methyl-guanosine | 5-formyl-2′-O-methylcytidine |
| 6-thio-7-methyl-guanosine | 1,2′-O-dimethylguanosine |
| 7-methylinosine | 4-demethylwyosine |
| 6-methoxy-guanosine | Isowyosine |
| 1-methylguanosine | N6-acetyladenosine |
| N2-methylguanosine | |
| N2,N2-dimethylguanosine | |
| 8-oxo-guanosine | |
| 7-methyl-8-oxo-guanosine | |
| 1-methyl-6-thio-guanosine | |

TABLE M2
Backbone modifications

2′-O-Methyl backbone
Peptide Nucleic Acid (PNA) backbone
phosphorothioate backbone
morpholino backbone
carbamate backbone
siloxane backbone
sulfide backbone
sulfoxide backbone
sulfone backbone
formacetyl backbone
thioformacetyl backbone
methyleneformacetyl backbone
riboacetyl backbone
alkene containing backbone
sulfamate backbone
sulfonate backbone
sulfonamide backbone
methyleneimino backbone
methylenehydrazino backbone
amide backbone

TABLE M3
Modified caps

m7GpppA
m7GpppC
m2,7GpppG
m2,2,7GpppG
m7Gpppm7G
m7,2′OmeGpppG
m72′dGpppG
m7,3′OmeGpppG
m7,3′dGpppG
GppppG
m7GppppG
m7GppppA
m7GppppC
m2,7GppppG
m2,2,7GppppG
m7Gppppm7G
m7,2′OmeGppppG
m72′dGppppG
m7,3′OmeGppppG
m7,3′dGppppG

### Combined Systems for Installing Multiple Gene Modifications

Combined Systems for Installing Two Genes within a Cell

[0517] As described herein, a first gene modifying system, used to insert a heterologous object sequence (e.g., a CAR) into the genome of a cell, may be combined with a second gene modifying system for installing a second heterologous object sequence (e.g., a second CAR) into the genome of a cell. Consequently, in some aspects, the present disclosure provides a first gene modifying system and a second gene modifying system. The first gene modifying system comprises a first retrotransposon gene modifying polypeptide and a first template RNA (e.g., comprising a heterologous object sequence encoding a CAR). The second gene modifying system comprises a second retrotransposon gene modifying polypeptide and a second template RNA.

[0518] In some embodiments, two systems may be utilized to introduce multiple edits to the same cell. In some embodiments, the two systems may be introduced into cells simultaneously or separately. In some embodiments, editing efficiency when inserting whole genes using the first gene modifying system is not affected by the co-delivery of another gene modifying system to insert another gene into the cell. In some embodiments, treating T cells with both the first and second systems results in co-occurrence of the two editing events in the same cell.

[0519] In some embodiments, a gene modifying system comprising a retrotransposon gene modifying polypeptide and a first template RNA, used to insert a heterologous object sequence (e.g., a CAR) into the genome of a cell, may be combined with a second template RNA for installing a second heterologous object sequence (e.g., a second CAR) into the genome of a cell.

[0520] In some embodiments, the system comprising two template RNAs may be utilized to introduce multiple edits to the same cell. In some embodiments, the two template RNAs may be introduced into cells simultaneously or separately. In some embodiments, editing efficiency when inserting whole genes using the system with the first template RNA is not affected by the co-delivery of another template RNA to insert another gene into the cell. In some embodiments, treating T cells with the system comprising two template RNAs results in co-occurrence of the two editing events in the same cell.

[0521] In some embodiments, the two systems or system comprising two template RNAs may be used to insert two CARs specific to different ligands on a target cell (e.g., a neoplastic cell). For example, the system or systems described herein could insert two CARs having specificity to CD20 and CD22, CD19 and CD20, CD19 and CD22, or such as BCMA and GPRC5D.

[0522] In other embodiments, the two systems or system comprising two template RNAs may be used to insert a CAR molecule and a TCR or safety/suicide switch (e.g., a caspase (e.g., caspase-9 or iCasp-9) or RQR8) into a cell.

Combined Systems for Installing a Gene and Editing a Gene within a Cell

[0523] In another aspect, a first gene modifying system, used to insert a heterologous object sequence (e.g., a CAR) into the genome of a cell, may be combined with an additional system for modifying DNA to install a mutation (e.g., resulting in knock down or knock out of a target gene, or a correction or deletion of an aberrant gene) into a human gene.

[0524] In some embodiments, two systems may be utilized to introduce multiple edits to the same cell. In some embodiments, the two systems may be introduced into cells simultaneously or separately. In some embodiments, editing efficiency when inserting whole genes using the first gene modifying system is not affected by the co-delivery of another exemplary system containing a heterologous gene modifying polypeptide (e.g., directing a short edit, e.g., an indel or substitution in the DNA). In some embodiments, editing efficiency when making short edits (e.g., editing of 5 nucleotides or fewer) is not affected by the co-delivery of a gene modifying system containing a retrotransposon gene modifying polypeptide (e.g., directing the insertion of a gene). In some embodiments, treating T cells with both the first and second systems results in high level of co-occurrence of the two editing events in the same cell. In some embodiments, no skewing in the distribution of the subpopulations or phenotypes of T cells is observed when comparing mock treated T cells, T cells edited by just the first gene modifying system, and T cells edited by both the first and second gene modifying systems.

[0525] In some embodiments, the additional system comprises: (A) a heterologous gene modifying polypeptide or a nucleic acid encoding the heterologous gene modifying polypeptide, wherein the heterologous gene modifying polypeptide comprises (i) a reverse transcriptase domain, and either (x) an endonuclease domain that contains DNA binding functionality or (y) an endonuclease domain and separate DNA binding domain; and (B) a template RNA. A heterologous gene modifying polypeptide, in some embodiments, acts as a substantially autonomous protein machine capable of integrating a template nucleic acid sequence into a target DNA molecule (e.g., in a mammalian host cell, such as a genomic DNA molecule in the host cell), substantially without relying on host machinery. For example, the heterologous gene modifying protein may comprise a DNA-binding domain, a reverse transcriptase domain, and an endonuclease domain. In some embodiments, the DNA-binding function may involve an RNA component that directs the protein to a DNA sequence, e.g., a gRNA spacer. In other embodiments, the heterologous gene modifying polypeptide may comprise a reverse transcriptase domain and an endonuclease domain. The RNA template element of a system is typically heterologous to the heterologous gene modifying polypeptide element and provides an object sequence to be inserted (reverse transcribed) into the host genome. In some embodiments, the heterologous gene modifying polypeptide is capable of target primed reverse transcription. In some embodiments, the heterologous gene modifying polypeptide is capable of second-strand synthesis.

[0526] In some embodiments the system is combined with a second polypeptide. In some embodiments, the second polypeptide may comprise an endonuclease domain. In some embodiments, the second polypeptide may comprise a polymerase domain, e.g., a reverse transcriptase domain. In some embodiments, the second polypeptide may comprise a DNA-dependent DNA polymerase domain. In some embodiments, the second polypeptide aids in completion of the genome edit, e.g., by contributing to second-strand synthesis or DNA repair resolution.

[0527] A functional heterologous gene modifying polypeptide can be made up of unrelated DNA binding, reverse transcription, and endonuclease domains. This modular structure allows combining of functional domains, e.g., dCas9 (DNA binding), MMLV reverse transcriptase (reverse transcription), FokI (endonuclease). In some embodiments, multiple functional domains may arise from a single protein, e.g., Cas9 or Cas9 nickase (DNA binding, endonuclease).

[0528] In some embodiments, a heterologous gene modifying polypeptide includes one or more domains that, collectively, facilitate 1) binding the template nucleic acid, 2) binding the target DNA molecule, and 3) facilitate integration of the at least a portion of the template nucleic acid into the target DNA. In some embodiments, the heterologous gene modifying polypeptide is an engineered polypeptide that comprises one or more amino acid substitutions to a corresponding naturally occurring sequence. In some embodiments, the heterologous gene modifying polypeptide comprises two or more domains that are heterologous relative to each other, e.g., through a heterologous fusion (or other conjugate) of otherwise wild-type domains, or well as fusions of modified domains, e.g., by way of replacement or fusion of a heterologous sub-domain or other substituted domain. For instance, in some embodiments, one or more of: the RT domain is heterologous to the DBD; the DBD is heterologous to the endonuclease domain; or the RT domain is heterologous to the endonuclease domain.

[0529] In some embodiments, a template RNA molecule for use in the system comprises, from 5′ to 3′ (1) a gRNA spacer; (2) a gRNA scaffold; (3) heterologous object sequence (4) a primer binding site (PBS) sequence. In some embodiments:
[0530] (1) Is a gRNA spacer of ˜18-22 nt, e.g., is 20 nt
[0531] (2) Is a gRNA scaffold comprising one or more hairpin loops, e.g., 1, 2, of 3 loops for associating the template with a Cas domain, e.g., a nickase Cas9 domain. In some embodiments, the gRNA scaffold comprises the sequence, from 5′ to 3′, GTTTTAGAGCTAGAAATAGCAAGTTAAAATAAGGCTAGTCCGTTATCAACTT GAAAAAGTGGGACCGAGTCGGTCC (SEQ ID NO: 5008).
[0532] (3) In some embodiments, the heterologous object sequence is, e.g., 7-74, e.g., 10-20, 20-30, 30-40, 40-50, 50-60, 60-70, or 70-80 nt or, 80-90 nt in length. In some embodiments, the first (most 5′) base of the sequence is not C.
[0533] (4) In some embodiments, the PBS sequence that binds the target priming sequence after nicking occurs is e.g., 3-20 nt, e.g., 7-15 nt, e.g., 12-14 nt. In some embodiments, the PBS sequence has 40-60% GC content.

[0534] In some embodiments, a second gRNA associated with the system may help drive complete integration. In some embodiments, the second gRNA may target a location that is 0-200 nt away from the first-strand nick, e.g., 0-50, 50-100, 100-200 nt away from the first-strand nick. In some embodiments, the second gRNA can only bind its target sequence after the edit is made, e.g., the gRNA binds a sequence present in the heterologous object sequence, but not in the initial target sequence.

[0535] In some embodiments, a heterologous gene modifying polypeptide as described herein comprises a reverse transcriptase or RT domain (e.g., as described herein) that comprises a MoMLV RT sequence or variant thereof. In embodiments, the MoMLV RT sequence comprises one or more mutations selected from D200N, L603W, T330P, T306K, W313F, D524G, E562Q, D583N, P51L, S67R, E67K, T197A, H204R, E302K, F309N, L435G, N454K, H594Q, D653N, R110S, and K103L. In embodiments, the MoMLV RT sequence comprises a combination of mutations, such as D200N, L603W, and T330P, optionally further including T306K and/or W313F.

[0536] In some embodiments, an endonuclease domain (e.g., as described herein) nCas9, e.g., comprising an N863A mutation (e.g., in spCas9) or a H840A mutation.

[0537] In some embodiments, the heterologous object sequence (e.g., of a system as described herein) is about 1-50, 50-100, 100-200, 200-300, 300-400, 400-500, 500-600, 600-700, 700-800, 800-900, 900-1000, or more, nucleotides in length.

[0538] In some embodiments, the RT and endonuclease domains are joined by a flexible linker, e.g., comprising the amino acid sequence SGGSSGGSSGSETPGTSESATPESSGGSSGGSS (SEQ ID NO: 5006).

[0539] In some embodiments, the endonuclease domain is N-terminal relative to the RT domain. In some embodiments, the endonuclease domain is C-terminal relative to the RT domain.

[0540] In some embodiments, the system incorporates a heterologous object sequence into a target site by TPRT, e.g., as described herein.

[0541] In some embodiments, a heterologous gene modifying polypeptide comprises a DNA binding domain. In some embodiments, a heterologous gene modifying polypeptide comprises an RNA binding domain. In some embodiments, the RNA binding domain comprises an RNA binding domain of B-box protein, MS2 coat protein, dCas, or an element of a sequence of a table herein. In some embodiments, the RNA binding domain is capable of binding to a template RNA with greater affinity than a reference RNA binding domain.

[0542] In some embodiments, a system comprising a heterologous gene modifying polypeptide is capable of producing an insertion into the target site of at least 1, 2, 3, 4, or 5 nucleotides (and optionally no more than 5 nucleotides). In some embodiments, a gene modifying system is capable of producing one or more substitutions, e.g., at least 1, 2, 3, 4, or 5 substitutions (and optionally no more than 5 nucleotides). In some embodiments, system comprising a heterologous gene modifying polypeptide is capable of producing a deletion of at least 1, 2, 3, 4, or 5 nucleotides (and optionally no more than 5 nucleotides). In some embodiments, the substitution is a transition mutation. In some embodiments, the substitution is a transversion mutation. In some embodiments, the substitution converts an adenine to a thymine, an adenine to a guanine, an adenine to a cytosine, a guanine to a thymine, a guanine to a cytosine, a guanine to an adenine, a thymine to a cytosine, a thymine to an adenine, a thymine to a guanine, a cytosine to an adenine, a cytosine to a guanine, or a cytosine to a thymine.

[0543] In some embodiments, an insertion, deletion, substitution, or combination thereof, increases or decreases expression (e.g. transcription or translation) of a gene. In some embodiments, an insertion, deletion, substitution, or combination thereof, increases or decreases expression (e.g. transcription or translation) of a gene by altering, adding, or deleting sequences in a promoter or enhancer, e.g. sequences that bind transcription factors. In some embodiments, an insertion, deletion, substitution, or combination thereof alters translation of a gene (e.g. alters an amino acid sequence), inserts or deletes a start or stop codon, alters or fixes the translation frame of a gene. In some embodiments, an insertion, deletion, substitution, or combination thereof alters splicing of a gene, e.g. by inserting, deleting, or altering a splice acceptor or donor site. In some embodiments, an insertion, deletion, substitution, or combination thereof alters transcript or protein half-life. In some embodiments, an insertion, deletion, substitution, or combination thereof alters protein localization in the cell (e.g. from the cytoplasm to a mitochondria, from the cytoplasm into the extracellular space (e.g. adds a secretion tag)). In some embodiments, an insertion, deletion, substitution, or combination thereof alters (e.g. improves) protein folding (e.g. to prevent accumulation of misfolded proteins). In some embodiments, an insertion, deletion, substitution, or combination thereof, alters, increases, decreases the activity of a gene, e.g. a protein encoded by the gene.

[0544] Exemplary heterologous gene modifying polypeptides, and systems comprising them and methods of using them are described, e.g., in PCT/US2021/020948, which is incorporated herein by reference with respect to retroviral RT domains, including the amino acid and nucleic acid sequences therein.

[0545] Exemplary heterologous gene modifying polypeptides and retroviral RT domain sequences are also described, e.g., in International Application No. PCT/US21/20948 filed Mar. 4, 2021, e.g., at Table 30, Table 31, and Table 44 therein; the entire application is incorporated by reference herein with respect to retroviral RTs, e.g., in said sequences and tables. Accordingly, a heterologous gene modifying polypeptide described herein may comprise an amino acid sequence according to any of the Tables mentioned in this paragraph, or a domain thereof (e.g., a retroviral RT domain), or a functional fragment or variant of any of the foregoing, or an amino acid sequence having at least 70%, 80%, 85%, 90%, 95%, or 99% identity thereto.

[0546] In some embodiments, a polypeptide for use in any of the systems described herein can be a molecular reconstruction or ancestral reconstruction based upon the aligned polypeptide sequence of multiple homologous proteins. In some embodiments, a reverse transcriptase domain for use in any of the systems described herein can be a molecular reconstruction or an ancestral reconstruction, or can be modified at particular residues, based upon alignments of reverse transcriptase domains from the same or different sources. A skilled artisan can, based on the Accession numbers provided herein, align polypeptides or nucleic acid sequences, e.g., by using routine sequence analysis tools as Basic Local Alignment Search Tool (BLAST) or CD-Search for conserved domain analysis. Molecular reconstructions can be created based upon sequence consensus, e.g. using approaches described in Ivics et al., Cell 1997, 501-510; Wagstaff et al., Molecular Biology and Evolution 2013, 88-99.

### Polypeptide Components of Heterologous Gene Modifying Systems

[0547] In some embodiments, the heterologous gene modifying polypeptide possesses the functions of DNA target site binding, template nucleic acid (e.g., RNA) binding, DNA target site cleavage, and template nucleic acid (e.g., RNA) writing, e.g., reverse transcription. In some embodiments, each functions is contained within a distinct domain. In some embodiments, a function may be attributed to two or more domains (e.g., two or more domains, together, exhibit the functionality). In some embodiments, two or more domains may have the same or similar function (e.g., two or more domains each independently have DNA-binding functionality, e.g., for two different DNA sequences). In other embodiments, one or more domains may be capable of enabling one or more functions, e.g., a Cas9 domain enabling both DNA binding and target site cleavage. In some embodiments, the domains are all located within a single polypeptide. In some embodiments, a first domain is in one polypeptide and a second domain is in a second polypeptide. For example, in some embodiments, the sequences may be split between a first polypeptide and a second polypeptide, e.g., wherein the first polypeptide comprises a reverse transcriptase (RT) domain and wherein the second polypeptide comprises a DNA-binding domain and an endonuclease domain, e.g., a nickase domain. As a further example, in some embodiments, the first polypeptide and the second polypeptide each comprise a DNA binding domain (e.g., a first DNA binding domain and a second DNA binding domain). In some embodiments, the first and second polypeptide may be brought together post-translationally via a split-intein to form a single heterologous gene modifying polypeptide.

[0548] In some aspects, a heterologous gene modifying polypeptide described herein comprises (e.g., a system described herein comprises a heterologous gene modifying polypeptide that comprises): 1) a Cas domain (e.g., a Cas nickase domain, e.g., a Cas9 nickase domain); 2) a reverse transcriptase (RT) domain disclosed herein, or a sequence having at least 70%, 75%, 80%, 85%, 90%, 95%, 97%, 98%, or 99% identity thereto, wherein the RT domain is C-terminal of the Cas domain; and a linker disposed between the RT domain and the Cas domain.

[0549] In some embodiments, the Cas domain comprises a sequence of Table 8A, or a sequence having at least 70%, 75%, 80%, 85%, 90%, 95%, 98%, or 99% identity thereto. In some embodiments, the heterologous gene modifying polypeptide comprises an amino acid sequence disclosed herein, or a sequence having at least 70%, 75%, 80%, 85%, 90%, 95%, 97%, 98%, or 99% identity thereto.

[0550] In some embodiments, the heterologous gene modifying polypeptide comprises a GG amino acid sequence between the Cas domain and the linker, an AG amino acid sequence between the RT domain and the second NLS, and/or a GG amino acid sequence between the linker and the RT domain. In some embodiments, the heterologous gene modifying polypeptide comprises a sequence of SEQ ID NO: 4000 which comprises the first NLS and the Cas domain, or a sequence having at least 70%, 75%, 80%, 85%, 90%, 95%, 98%, or 99% identity thereto. In some embodiments, the heterologous gene modifying polypeptide comprises a sequence of SEQ ID NO: 4001 which comprises the second NLS, or a sequence having at least 70%, 75%, 80%, 85%, 90%, 95%, 98%, or 99% identity thereto.

Exemplary N-terminal NLS-Cas9 domain
(SEQ ID NO: 4000)
MPAAKRVKLDGGDKKYSIGLDIGTNSVGWAVITDEYKVPSKKFKVLGNTDRHSIKKNLIGALLF
DSGETAEATRLKRTARRRYTRRKNRICYLQEIFSNEMAKVDDSFFHRLEESFLVEEDKKHERHP
IFGNIVDEVAYHEKYPTIYHLRKKLVDSTDKADLRLIYLALAHMIKFRGHFLIEGDLNPDNSDV
DKLFIQLVQTYNQLFEENPINASGVDAKAILSARLSKSRRLENLIAQLPGEKKNGLFGNLIALS
LGLTPNFKSNFDLAEDAKLQLSKDTYDDDLDNLLAQIGDQYADLFLAAKNLSDAILLSDILRVN
TEITKAPLSASMIKRYDEHHQDLTLLKALVRQQLPEKYKEIFFDQSKNGYAGYIDGGASQEEFY
KFIKPILEKMDGTEELLVKLNREDLLRKQRTFDNGSIPHQIHLGELHAILRRQEDFYPFLKDNR
EKIEKILTFRIPYYVGPLARGNSRFAWMTRKSEETITPWNFEEVVDKGASAQSFIERMTNFDKN
LPNEKVLPKHSLLYEYFTVYNELTKVKYVTEGMRKPAFLSGEQKKAIVDLLFKTNRKVTVKQLK
EDYFKKIECFDSVEISGVEDRFNASLGTYHDLLKIIKDKDFLDNEENEDILEDIVLTLTLFEDR
EMIEERLKTYAHLFDDKVMKQLKRRRYTGWGRLSRKLINGIRDKQSGKTILDFLKSDGFANRNF
MQLIHDDSLTFKEDIQKAQVSGQGDSLHEHIANLAGSPAIKKGILQTVKVVDELVKVMGRHKPE
NIVIEMARENQTTQKGQKNSRERMKRIEEGIKELGSQILKEHPVENTQLQNEKLYLYYLQNGRD
MYVDQELDINRLSDYDVDHIVPQSFLKDDSIDNKVLTRSDKARGKSDNVPSEEVVKKMKNYWRQ
LLNAKLITQRKFDNLTKAERGGLSELDKAGFIKRQLVETRQITKHVAQILDSRMNTKYDENDKL
IREVKVITLKSKLVSDFRKDFQFYKVREINNYHHAHDAYLNAVVGTALIKKYPKLESEFVYGDY
KVYDVRKMIAKSEQEIGKATAKYFFYSNIMNFFKTEITLANGEIRKRPLIETNGETGEIVWDKG
RDFATVRKVLSMPQVNIVKKTEVQTGGFSKESILPKRNSDKLIARKKDWDPKKYGGFDSPTVAY
SVLVVAKVEKGKSKKLKSVKELLGITIMERSSFEKNPIDFLEAKGYKEVKKDLIIKLPKYSLFE
LENGRKRMLASAGELQKGNELALPSKYVNFLYLASHYEKLKGSPEDNEQKQLFVEQHKHYLDEI
IEQISEFSKRVILADANLDKVLSAYNKHRDKPIREQAENIIHLFTLTNLGAPAAFKYFDTTIDR
KRYTSTKEVLDATLIHQSITGLYETRIDLSQLGGDGG
Exemplary C-terminal sequence comprising an NLS
(SEQ ID NO: 4001)
AGKRTADGSEFEKRTADGSEFESPKKKAKVE

### Writing Domain (RT Domain)

[0551] In certain aspects of the present invention, the writing domain of the heterologous gene modifying system possesses reverse transcriptase activity and is also referred to as a reverse transcriptase domain (a RT domain). In some embodiments, the RT domain comprises an RT catalytic portion and RNA-binding region (e.g., a region that binds the template RNA).

[0552] In some embodiments, a nucleic acid encoding the reverse transcriptase is altered from its natural sequence to have altered codon usage, e.g. improved for human cells. In some embodiments the reverse transcriptase domain is a heterologous reverse transcriptase from a retrovirus. In some embodiments, the RT domain has been mutated from its original amino acid sequence, e.g., has at least 1, 2, 3, 4, 5, 6, 7, 8, 9, 10, 20, 30, 40, 50, 60, 70, 80, 90, or 100 substitutions. In some embodiments, the RT domain is derived from the RT of a retrovirus, e.g., HIV-1 RT, Moloney Murine Leukemia Virus (MMLV) RT, avian myeloblastosis virus (AMV) RT, or Rous Sarcoma Virus (RSV) RT.

[0553] In some embodiments, the retroviral reverse transcriptase (RT) domain exhibits enhanced stringency of target-primed reverse transcription (TPRT) initiation, e.g., relative to an endogenous RT domain. In some embodiments, the RT domain initiates TPRT when the 3 nt in the target site immediately upstream of the first strand nick, e.g., the genomic DNA priming the RNA template, have at least 66% or 100% complementarity to the 3 nt of homology in the RNA template. In some embodiments, the RT domain initiates TPRT when there are less than 5 nt mismatched (e.g., less than 1, 2, 3, 4, or 5 nt mismatched) between the template RNA homology and the target DNA priming reverse transcription. In some embodiments, the RT domain is modified such that the stringency for mismatches in priming the TPRT reaction is increased, e.g., wherein the RT domain does not tolerate any mismatches or tolerates fewer mismatches in the priming region relative to a wild-type (e.g., unmodified) RT domain. In some embodiments, the RT domain comprises a HIV-1 RT domain. In embodiments, the HIV-1 RT domain initiates lower levels of synthesis even with three nucleotide mismatches relative to an alternative RT domain (e.g., as described by Jamburuthugoda and Eickbush J Mol Biol 407(5):661-672 (2011); incorporated herein by reference in its entirety). In some embodiments, the RT domain forms a dimer (e.g., a heterodimer or homodimer). In some embodiments, the RT domain is monomeric. In some embodiments, an RT domain, naturally functions as a monomer or as a dimer (e.g., heterodimer or homodimer). In some embodiments, an RT domain naturally functions as a monomer, e.g., is derived from a virus wherein it functions as a monomer. In embodiments, the RT domain is selected from an RT domain from murine leukemia virus (MLV; sometimes referred to as MoMLV) (e.g., P03355), porcine endogenous retrovirus (PERV) (e.g., UniProt Q4VFZ2), mouse mammary tumor virus (MMTV) (e.g., UniProt P03365), Avian reticuloendotheliosis virus (AVIRE) (e.g., UniProtKB accession: P03360); Feline leukemia virus (FLV or FeLV) (e.g., e.g., UniProtKB accession: P10273); Mason-Pfizer monkey virus (MPMV) (e.g., UniProt P07572), bovine leukemia virus (BLV) (e.g., UniProt P03361), human T-cell leukemia virus-1 (HTLV-1) (e.g., UniProt P03362), human foamy virus (HFV) (e.g., UniProt P14350), simian foamy virus (SFV) (e.g., SFV3L) (e.g., UniProt P23074 or P27401), or bovine foamy/syncytial virus (BFV/BSV) (e.g., UniProt 041894), or a functional fragment or variant thereof (e.g., an amino acid sequence having at least 70%, 80%, 90%, 95%, or 99% identity thereto). In some embodiments, an RT domain is dimeric in its natural functioning. In some embodiments, the RT domain is derived from a virus wherein it functions as a dimer. In embodiments, the RT domain is selected from an RT domain from avian sarcoma/leukemia virus (ASLV) (e.g., UniProt A0A142BKH1), Rous sarcoma virus (RSV) (e.g., UniProt P03354), avian myeloblastosis virus (AMV) (e.g., UniProt Q83133), human immunodeficiency virus type I (HIV-1) (e.g., UniProt P03369), human immunodeficiency virus type II (HIV-2) (e.g., UniProt P15833), simian immunodeficiency virus (SIV) (e.g., UniProt P05896), bovine immunodeficiency virus (BIV) (e.g., UniProt P19560), equine infectious anemia virus (EIAV) (e.g., UniProt P03371), or feline immunodeficiency virus (FIV) (e.g., UniProt P16088) (Herschhorn and Hizi Cell Mol Life Sci 67(16):2717-2747 (2010)), or a functional fragment or variant thereof (e.g., an amino acid sequence having at least 70%, 80%, 90%, 95%, or 99% identity thereto). Naturally heterodimeric RT domains may, in some embodiments, also be functional as homodimers. In some embodiments, dimeric RT domains are expressed as fusion proteins, e.g., as homodimeric fusion proteins or heterodimeric fusion proteins. In some embodiments, the RT function of the system is fulfilled by multiple RT domains (e.g., as described herein). In further embodiments, the multiple RT domains are fused or separate, e.g., may be on the same polypeptide or on different polypeptides.

[0554] In some embodiments, a system described herein comprises an integrase domain, e.g., wherein the integrase domain may be part of the RT domain. In some embodiments, an RT domain (e.g., as described herein) comprises an integrase domain. In some embodiments, an RT domain (e.g., as described herein) lacks an integrase domain, or comprises an integrase domain that has been inactivated by mutation or deleted. In some embodiment, a system described herein comprises an RNase H domain, e.g., wherein the RNase H domain may be part of the RT domain. In some embodiments, the RNase H domain is not part of the RT domain and is covalently linked via a flexible linker. In some embodiments, an RT domain (e.g., as described herein) comprises an RNase H domain, e.g., an endogenous RNAse H domain or a heterologous RNase H domain. In some embodiments, an RT domain (e.g., as described herein) lacks an RNase H domain. In some embodiments, an RT domain (e.g., as described herein) comprises an RNase H domain that has been added, deleted, mutated, or swapped for a heterologous RNase H domain. In some embodiments, the polypeptide comprises an inactivated endogenous RNase H domain. In some embodiments, an endogenous RNase H domain from one of the other domains of the polypeptide is genetically removed such that it is not included in the polypeptide, e.g., the endogenous RNase H domain is partially or completely truncated from the comprising domain. In some embodiments, mutation of an RNase H domain yields a polypeptide exhibiting lower RNase activity, e.g., as determined by the methods described in Kotewicz et al. Nucleic Acids Res 16(1):265-277 (1988) (incorporated herein by reference in its entirety), e.g., lower by at least 10%, 20%, 30%, 40%, 50%, 60%, 70%, 80%, or 90% compared to an otherwise similar domain without the mutation. In some embodiments, RNase H activity is abolished.

[0555] In some embodiments, an RT domain is mutated to increase fidelity compared to an otherwise similar domain without the mutation. For instance, in some embodiments, a YADD (SEQ ID NO: 15409) or YMDD motif (SEQ ID NO: 15410) in an RT domain (e.g., in a reverse transcriptase) is replaced with YVDD (SEQ ID NO: 15411). In embodiments, replacement of the YADD (SEQ ID NO: 15409) or YMDD (SEQ ID NO: 15410) or YVDD (SEQ ID NO: 15411) results in higher fidelity in retroviral reverse transcriptase activity (e.g., as described in Jamburuthugoda and Eickbush J Mol Biol 2011; incorporated herein by reference in its entirety).

[0556] In some embodiments, a gene modifying polypeptide described herein comprises an RT domain having an amino acid sequence according to Table 6, or a sequence having at least 70%, 80%, 85%, 90%, 95%, 97%, 98%, or 99% identity thereto. In some embodiments, a nucleic acid described herein encodes an RT domain having an amino acid sequence according to Table 6, or a sequence having at least 70%, 80%, 85%, 90%, 95%, 97%, 98%, or 99% identity thereto.

TABLE 6
Exemplary reverse transcriptase domains from retroviruses

| RT | SEQ ID | |
|---|---|---|
| Name | NO: | RT amino acid sequence |
| AVIRE_ | 8,003 | TAPLEEEYRLFLEAPIQNVTLLEQWKREIPKVWAEINPPGLASTQAPIHVQLLSTALPVRVRQYPITLEAKRSLRETIRKFRAAGILRPVHSPWNTPLLPV |
| P03360_ | | RKSGTSEYRMVQDLREVNKRVETIHPTVPNPYTLLSLLPPDRIWYSVLDLKDAFFCIPLAPESQLIFAFEWADAEEGESGQLTWTRLPQGFKNSPTLFN |
| 3mutA | | EALNRDLQGFRLDHPSVSLLQYVDDLLIAADTQAACLSATRDLLMTLAELGYRVSGKKAQLCQEEVTYLGFKIHKGSRSLSNSRTQAILQIPVPKTKRQV |
| | | REFLGKIGYCRLFIPGFAELAQPLYAATRPGNDPLVWGEKEEEAFQSLKLALTQPPALALPSLDKPFQLFVEETSGAAKGVLTQALGPWKRPVAYLSKR |
| | | LDPVAAGWPRCLRAIAAAALLTREASKLTFGQDIEITSSHNLESLLRSPPDKWLTNARITQYQVLLLDPPRVRFKQTAALNPATLLPETDDTLPIHHCLDT |
| | | LDSLTSTRPDLTDQPLAQAEATLFTDGSSYIRDGKRYAGAAVVTLDSVIWAEPLPIGTSAQKAELIALTKALEWSKDKSVNIYTDSRYAFATLHVHGMIY |
| | | RERGWLTAGGKAIKNAPEILALLTAVWLPKRVAVMHCKGHQKDDAPTSTGNRRADEVAREVAIRPLSTQATIS |
| FLV_ | 8,020 | TLQLEEEYRLFEPESTQKQEMDIWLKNFPQAWAETGGMGTAHCQAPVLIQLKATATPISIRQYPMPHEAYQGIKPHIRRMLDQGILKPCQSPWNTPLLP |
| P10273_ | | VKKPGTEDYRPVQDLREVNKRVEDIHPTVPNPYNLLSTLPPSHPWYTVLDLKDAFFCLRLHSESQLLFAFEWRDPEIGLSGQLTWTRLPQGFKNSPTL |
| 3mutA | | FNEALHSDLADFRVRYPALVLLQYVDDLLLAAATRTECLEGTKALLETLGNKGYRASAKKAQICLQEVTYLGYSLKDGQRWLTKARKEAILSIPVPKNSR |
| | | QVREFLGKAGYCRLFIPGFAELAAPLYPLTRPGTLFQWGTEQQLAFEDIKKALLSSPALGLPDITKPFELFIDENSGFAKGVLVQKLGPWKRPVAYLSKK |
| | | LDTVASGWPPCLRMVAAIAILVKDAGKLTLGQPLTILTSHPVEALVRQPPNKWLSNARMTHYQAMLLDAERVHFGPTVSLNPATLLPLPSGGNHHDCL |
| | | QILAETHGTRPDLTDQPLPDADLTWYTDGSSFIRNGEREAGAAVTTESEVIWAAPLPPGTSAQRAELIALTQALKMAEGKKLTVYTDSRYAFATTHVHG |
| | | EIYRRRGWLTSEGKEIKNKNEILALLEALFLPKRLSIIHCPGHQKGDSPQAKGNRLADDTAKKAATETHSSLTVLP |
| MLVMS_ | 8,074 | TLNIEDEHRLHETSKEPDVSLGSTWLSDFPQAWAETGGMGLAVRQAPLIIPLKATSTPVSIKQYPMSQEARLGIKPHIQRLLDQGILVPCQSPWNTPLLP |
| P03355_ | | VKKPGTNDYRPVQDLREVNKRVEDIHPTVPNPYNLLSGLPPSHQWYTVLDLKDAFFCLRLHPTSQPLFAFEWRDPEMGISGQLTWTRLPQGFKNSPT |
| 3mutA_ | | LFNEALHRDLADFRIQHPDLILLQYVDDLLLAATSELDCQQGTRALLQTLGNLGYRASAKKAQICQKQVKYLGYLLKEGQRWLTEARKETVMGQPTPKT |
| WS | | PRQLREFLGKAGFCRLFIPGFAEMAAPLYPLTKPGTLFNWGPDQQKAYQEIKQALLTAPALGLPDLTKPFELFVDEKQGYAKGVLTQKLGPWRRPVAY |
| | | LSKKLDPVAAGWPPCLRMVAAIAVLTKDAGKLTMGQPLVILAPHAVEALVKQPPDRWLSNARMTHYQALLLDTDRVQFGPWVALNPATLLPLPEEGLQ |
| | | HNCLDILAEAHGTRPDLTDQPLPDADHTWYTDGSSLLQEGQRKAGAAVTTETEVIWAKALPAGTSAQRAELIALTQALKMAEGKKLNVYTDSRYAFAT |
| | | AHIHGEIYRRRGWLTSEGKEIKNKDEILALLKALFLPKRLSIIHCPGHQKGHSAEARGNRMADQAARKAAITETPDTSTLL |
| SFV3L_ | 8,113 | MDPLQLLQPLEAEIKGTKLKAHWNSGATITCVPQAFLEEEVPIKNIWIKTIHGEKEQPVYYLTFKIQGRKVEAEVISSPYDYILVSPSDIPWLMKKPLQLTT |
| P27401_ | | LVPLQEYEERLLKQTMLTGSYKEKLQSLFLKYDALWQHWENQVGHRRIKPHHIATGTVNPRPQKQYPINPKAKASIQTVINDLLKQGVLIQQNSIMNTP |
| 2mutA | | VYPVPKPDGKWRMVLDYREVNKTIPLIAAQNQHSAGILSSIFRGKYKTTLDLSNGFWAHSITPESYWLTAFTWLGQQYCWTRLPQGFLNSPALFNADV |
| | | VDLLKEVPNVQVYVDDIYISHDDPREHLEQLEKVFSLLLNAGYVVSLKKSEIAQHEVEFLGFNITKEGRGLTETFKQKLLNITPPRDLKQLQSILGKLNFA |
| | | RNFIPNFSELVKPLYNIIATAPGKYITWTTDNSQQLQNIISMLNSAENLEERNPEVRLIMKVNTSPSAGYIRFYNEFAKRPIMYLNYVYTKAEVKFTNTEKL |
| | | LTTIHKGLIKALDLGMGQEILVYSPIVSMTKIQKTPLPERKALPIRWITWMSYLEDPRIQFHYDKTLPELQQVPTVTDDIIAKIKHPSEFSMVFYTDGSAIKH |
| | | PNVNKSHNAGMGIAQVQFKPEFTVINTWSIPLGDHTAQLAEVAAVEFACKKALKIDGPVLIVTDSFYVAESVNKELPYWQSNGFFNNKKKPLKHVSKW |
| | | KSIADCIQLKPDIIIIHEKGHQPTASTFHTEGNNLADKLATQGSYVVN |

[0557] In some embodiments, reverse transcriptase domains are modified, for example by site-specific mutation. In some embodiments, reverse transcriptase domains are engineered to have improved properties, e.g. SuperScript IV (SSIV) reverse transcriptase derived from the MMLV RT. In some embodiments, the reverse transcriptase domain may be engineered to have lower error rates, e.g., as described in WO2001068895, incorporated herein by reference. In some embodiments, the reverse transcriptase domain may be engineered to be more thermostable. In some embodiments, the reverse transcriptase domain may be engineered to be more processive. In some embodiments, the reverse transcriptase domain may be engineered to have tolerance to inhibitors. In some embodiments, the reverse transcriptase domain may be engineered to be faster. In some embodiments, the reverse transcriptase domain may be engineered to better tolerate modified nucleotides in the RNA template. In some embodiments, the reverse transcriptase domain may be engineered to insert modified DNA nucleotides. In some embodiments, the reverse transcriptase domain is engineered to bind a template RNA. In some embodiments, one or more mutations are chosen from D200N, L603W, T330P, D524G, E562Q, D583N, P51L, S67R, E67K, T197A, H204R, E302K, F309N, W313F, L435G, N454K, H594Q, L671P, E69K, H8Y, T306K, or D653N in the RT domain of murine leukemia virus reverse transcriptase or a corresponding mutation at a corresponding position of another RT domain.

[0558] In some embodiments, a heterologous gene modifying polypeptide comprises the RT domain from a retroviral reverse transcriptase, e.g., a wild-type M-MLV RT, e.g., comprising the following sequence:

M-MLV (WT):
(SEQ ID NO: 5002)
TLNIEDEYRLHETSKEPDVSLGSTWLSDFPQAWAETGGMGLAVRQAPLI
IPLKATSTPVSIKQYPMSQEARLGIKPHIQRLLDQGILVPCQSPWNTPL
LPVKKPGTNDYRPVQDLREVNKRVEDIHPTVPNPYNLLSGLPPSHQWYT
VLDLKDAFFCLRLHPTSQPLFAFEWRDPEMGISGQLTWTRLPQGFKNSP
TLFDEALHRDLADFRIQHPDLILLQYVDDLLLAATSELDCQQGTRALLQ
TLGNLGYRASAKKAQICQKQVKYLGYLLKEGQRWLTEARKETVMGQPTP
KTPRQLREFLGTAGFCRLWIPGFAEMAAPLYPLTKTGTLFNWGPDQQKA
YQEIKQALLTAPALGLPDLTKPFELFVDEKQGYAKGVLTQKLGPWRRPV
AYLSKKLDPVAAGWPPCLRMVAAIAVLTKDAGKLTMGQPLVILAPHAVE
ALVKQPPDRWLSNARMTHYQALLLDTDRVQFGPVVALNPATLLPLPEEG
LQHNCLDILAEAHGTRPDLTDQPLPDADHTWYTDGSSLLQEGQRKAGAA
VTTETEVIWAKALPAGTSAQRAELIALTQALKMAEGKKLNVYTDSRYAF
ATAHIHGEIYRRRGLLTSEGKEIKNKDEILALLKALFLPKRLSIIHCPG
HQKGHSAEARGNRMADQAARKAAITETPDTSTLLI

[0559] In some embodiments, a heterologous gene modifying polypeptide comprises the RT domain from a retroviral reverse transcriptase, e.g., an M-MLV RT, e.g., comprising the following sequence:

(SEQ ID NO: 5003)
TLNIEDEHRLHETSKEPDVSLGSTWLSDFPQAWAETGGMGLAVRQAPLI
IPLKATSTPVSIKQYPMSQEARLGIKPHIQRLLDQGILVPCQSPWNTPL
LPVKKPGTNDYRPVQDLREVNKRVEDIHPTVPNPYNLLSGLPPSHQWYT
VLDLKDAFFCLRLHPTSQPLFAFEWRDPEMGISGQLTWTRLPQGFKNSP
TLFDEALHRDLADFRIQHPDLILLQYVDDLLLAATSELDCQQGTRALLQ
TLGNLGYRASAKKAQICQKQVKYLGYLLKEGQRWLTEARKETVMGQPTP
KTPRQLREFLGTAGFCRLWIPGFAEMAAPLYPLTKTGTLFNWGPDQQKA
YQEIKQALLTAPALGLPDLTKPFELFVDEKQGYAKGVLTQKLGPWRRPV
AYLSKKLDPVAAGWPPCLRMVAAIAVLTKDAGKLTMGQPLVILAPHAVE
ALVKQPPDRWLSNARMTHYQALLLDTDRVQFGPVVALNPATLLPLPEEG
LQHNCLDILAEAHGTRPDLTDQPLPDADHTWYTDGSSLLQEGQRKAGAA
VTTETEVIWAKALPAGTSAQRAELIALTQALKMAEGKKLNVYTDSRYAF
ATAHIHGEIYRRRGLLTSEGKEIKNKDEILALLKALFLPKRLSIIHCPG
HQKGHSAEARGNRMADQAARKAAITETPDTSTLL

[0560] In some embodiments, a heterologous gene modifying polypeptide comprises the RT domain from a retroviral reverse transcriptase comprising the sequence of amino acids 659-1329 of NP_057933. In embodiments, the heterologous gene modifying polypeptide further comprises one additional amino acid at the N-terminus of the sequence of amino acids 659-1329 of NP_057933, e.g., as shown below:

(SEQ ID NO: 5004)
TLNIEDEHRLHETSKEPDVSLGSTWLSDFPQAWAETGGMGLAVRQAPLI
IPLKATSTPVSIKQYPMSQEARLGIKPHIQRLLDQGILVPCQSPWNTPL
LPVKKPGTNDYRPVQDLREVNKRVEDIHPTVPNPYNLLSGLPPSHQWYT
VLDLKDAFFCLRLHPTSQPLFAFEWRDPEMGISGQLTWTRLPQGFKNSP
TLFDEALHRDLADFRIQHPDLILLQYVDDLLLAATSELDCQQGTRALLQ
TLGNLGYRASAKKAQICQKQVKYLGYLLKEGQRWLTEARKETVMGQPTP
KTPRQLREFLGTAGFCRLWIPGFAEMAAPLYPLTKTGTLFNWGPDQQKA
YQEIKQALLTAPALGLPDLTKPFELFVDEKQGYAKGVLTQKLGPWRRPV
AYLSKKLDPVAAGWPPCLRMVAAIAVLTKDAGKLTMGQPLVILAPHAVE
ALVKQPPDRWLSNARMTHYQALLLDTDRVQFGPVVALNPATLLPLPEEG
LQHNCLDILAEAHGTRPDLTDQPLPDADHTWYTDGSSLLQEGQRKAGAA
VTTETEVIWAKALPAGTSAQRAELIALTQALKMAEGKKLNVYTDSRYAF
ATAHIHGEIYRRRGLLTSEGKEIKNKDEILALLKALFLPKRLSIIHCPG
HQKGHSAEARGNRMADQAARKAA

Core RT (bold), annotated per above
RNAseH (underlined), annotated per above

[0561] In embodiments, the heterologous gene modifying polypeptide further comprises one additional amino acid at the C-terminus of the sequence of amino acids 659-1329 of NP_057933. In embodiments, the heterologous gene modifying polypeptide comprises an RNaseH1 domain (e.g., amino acids 1178-1318 of NP_057933).

[0562] In some embodiments, a retroviral reverse transcriptase domain, e.g., M-MLV RT, may comprise one or more mutations from a wild-type sequence that may improve features of the RT, e.g., thermostability, processivity, and/or template binding. In some embodiments, an M-MLV RT domain comprises, relative to the M-MLV (WT) sequence above, one or more mutations, e.g., selected from D200N, L603W, T330P, T306K, W313F, D524G, E562Q, D583N, P51L, S67R, E67K, T197A, H204R, E302K, F309N, L435G, N454K, H594Q, D653N, R110S, K103L, e.g., a combination of mutations, such as D200N, L603W, and T330P, optionally further including T306K and W313F. In some embodiments, an M-MLV RT used herein comprises the mutations D200N, L603W, T330P, T306K, and W313F. In embodiments, the mutant M-MLV RT comprises the following amino acid sequence:

M-MLV (PE2):
(SEQ ID NO: 5005)
TLNIEDEYRLHETSKEPDVSLGSTWLSDFPQAWAETGGMGLAVRQAPLI
IPLKATSTPVSIKQYPMSQEARLGIKPHIQRLLDQGILVPCQSPWNTPL
LPVKKPGTNDYRPVQDLREVNKRVEDIHPTVPNPYNLLSGLPPSHQWYT
VLDLKDAFFCLRLHPTSQPLFAFEWRDPEMGISGQLTWTRLPQGFKNSP
TLFNEALHRDLADFRIQHPDLILLQYVDDLLLAATSELDCQQGTRALLQ
TLGNLGYRASAKKAQICQKQVKYLGYLLKEGQRWLTEARKETVMGQPTP
KTPRQLREFLGKAGFCRLFIPGFAEMAAPLYPLTKPGTLFNWGPDQQKA
YQEIKQALLTAPALGLPDLTKPFELFVDEKQGYAKGVLTQKLGPWRRPV
AYLSKKLDPVAAGWPPCLRMVAAIAVLTKDAGKLTMGQPLVILAPHAVE
ALVKQPPDRWLSNARMTHYQALLLDTDRVQFGPVVALNPATLLPLPEEG
LQHNCLDILAEAHGTRPDLTDQPLPDADHTWYTDGSSLLQEGQRKAGAA
VTTETEVIWAKALPAGTSAQRAELIALTQALKMAEGKKLNVYTDSRYAF
ATAHIHGEIYRRRGWLTSEGKEIKNKDEILALLKALFLPKRLSIIHCPG
HQKGHSAEARGNRMADQAARKAAITETPDTSTLLI

[0563] In some embodiments, a writing domain (e.g., RT domain) comprises an RNA-binding domain, e.g., that specifically binds to an RNA sequence. In some embodiments, a template RNA comprises an RNA sequence that is specifically bound by the RNA-binding domain of the writing domain.

[0564] In some embodiments, the reverse transcription domain only recognizes and reverse transcribes a specific template, e.g., a template RNA of the system. In some embodiments, the template comprises a sequence or structure that enables recognition and reverse transcription by a reverse transcription domain. In some embodiments, the template comprises a sequence or structure that enables association with an RNA-binding domain of a polypeptide component of a genome engineering system described herein. In some embodiments, the genome engineering system reverse preferably transcribes a template comprising an association sequence over a template lacking an association sequence.

[0565] The writing domain may also comprise DNA-dependent DNA polymerase activity, e.g., comprise enzymatic activity capable of writing DNA into the genome from a template DNA sequence. In some embodiments, DNA-dependent DNA polymerization is employed to complete second-strand synthesis of a target site edit. In some embodiments, the DNA-dependent DNA polymerase activity is provided by a DNA polymerase domain in the polypeptide. In some embodiments, the DNA-dependent DNA polymerase activity is provided by a reverse transcriptase domain that is also capable of DNA-dependent DNA polymerization, e.g., second-strand synthesis. In some embodiments, the DNA-dependent DNA polymerase activity is provided by a second polypeptide of the system. In some embodiments, the DNA-dependent DNA polymerase activity is provided by an endogenous host cell polymerase that is optionally recruited to the target site by a component of the genome engineering system.

[0566] In some embodiments, the reverse transcriptase domain has a lower probability of premature termination rate (P_{off}) in vitro relative to a reference reverse transcriptase domain. In some embodiments, the reference reverse transcriptase domain is a viral reverse transcriptase domain, e.g., the RT domain from M-MLV.

[0567] In some embodiments, the reverse transcriptase domain has a lower probability of premature termination rate (P_{off}) in vitro of less than about 5×10⁻³/nt, 5×10⁻⁴/nt, or 5×10⁻⁶/nt, e.g., as measured on a 1094 nt RNA. In embodiments, the in vitro premature termination rate is determined as described in Bibillo and Eickbush (2002) J Biol Chem 277(38):34836-34845 (incorporated by reference herein its entirety).

[0568] In some embodiments, the reverse transcriptase domain is able to complete at least about 30% or 50% of integrations in cells. The percent of complete integrations can be measured by dividing the number of substantially full-length integration events (e.g., genomic sites that comprise at least 98% of the expected integrated sequence) by the number of total (including substantially full-length and partial) integration events in a population of cells. In embodiments, the integrations in cells is determined (e.g., across the integration site) using long-read amplicon sequencing, e.g., as described in Karst et al. (2020) bioRxiv doi.org/10.1101/645903 (incorporated by reference herein in its entirety).

[0569] In embodiments, quantifying integrations in cells comprises counting the fraction of integrations that contain at least about 75%, 80%, 85%, 90%, 95%, 96%, 97%, 98%, 99%, or 100% of the DNA sequence corresponding to the template RNA (e.g., a template RNA having a length of at least 0.05, 0.1, 0.5, 0.6, 0.7, 0.8, 0.9, 1, 1.5, 2, 3, 4, or 5 kb, e.g., a length between 0.5-0.6, 0.6-0.7, 0.7-0.8, 0.8-0.9, 1.0-1.2, 1.2-1.4, 1.4-1.6, 1.6-1.8, 1.8-2.0, 2-3, 3-4, or 4-5 kb).

[0570] In some embodiments, the reverse transcriptase domain is capable of polymerizing dNTPs in vitro. In embodiments, the reverse transcriptase domain is capable of polymerizing dNTPs in vitro at a rate between 0.1-50 nt/sec (e.g., between 0.1-1, 1-10, or 10-50 nt/sec). In embodiments, polymerization of dNTPs by the reverse transcriptase domain is measured by a single-molecule assay, e.g., as described in Schwartz and Quake (2009) PNAS 106(48):20294-20299 (incorporated by reference in its entirety).

[0571] In some embodiments, the reverse transcriptase domain has an in vitro error rate (e.g., misincorporation of nucleotides) of between 1×10⁻³-1×10⁻⁴ or 1×10⁻⁴-1×10⁻⁵ substitutions/nt, e.g., as described in Yasukawa et al. (2017) Biochem Biophys Res Commun 492(2):147-153 (incorporated herein by reference in its entirety). In some embodiments, the reverse transcriptase domain has an error rate (e.g., misincorporation of nucleotides) in cells (e.g., HEK293T cells) of between 1×10⁻³-1×10⁻⁴ or 1×10⁻⁴-1×10⁻⁵ substitutions/nt, e.g., by long-read amplicon sequencing, e.g., as described in Karst et al. (2020) bioRxiv doi.org/10.1101/645903 (incorporated by reference herein in its entirety).

[0572] In some embodiments, the reverse transcriptase domain is capable of performing reverse transcription of a target RNA in vitro. In some embodiments, the reverse transcriptase requires a primer of at least 3 nucleotides to initiate reverse transcription of a template. In some embodiments, reverse transcription of the target RNA is determined by detection of cDNA from the target RNA (e.g., when provided with a ssDNA primer, e.g., which anneals to the target with at least 3, 4, 5, 6, 7, 8, 9, or 10 nt at the 3′ end), e.g., as described in Bibillo and Eickbush (2002) J Biol Chem 277(38):34836-34845 (incorporated herein by reference in its entirety).

[0573] In some embodiments, the reverse transcriptase domain performs reverse transcription at least 5 or 10 times more efficiently (e.g., by cDNA production), e.g., when converting its RNA template to cDNA, for example, as compared to an RNA template lacking the protein binding motif (e.g., a 3′ UTR). In embodiments, efficiency of reverse transcription is measured as described in Yasukawa et al. (2017) Biochem Biophys Res Commun 492(2):147-153 (incorporated by reference herein in its entirety).

[0574] In some embodiments, the reverse transcriptase domain specifically binds a specific RNA template with higher frequency (e.g., about 5 or 10-fold higher frequency) than any endogenous cellular RNA, e.g., when expressed in cells (e.g., HEK293T cells). In embodiments, frequency of specific binding between the reverse transcriptase domain and the template RNA are measured by CLIP-seq, e.g., as described in Lin and Miles (2019) Nucleic Acids Res 47(11):5490-5501 (incorporated herein by reference in its entirety).

### Template Nucleic Acid Binding Domain

[0575] The heterologous gene modifying polypeptide typically contains regions capable of associating with the template nucleic acid (e.g., template RNA). In some embodiments, the template nucleic acid binding domain is an RNA binding domain. In some embodiments, the RNA binding domain is a modular domain that can associate with RNA molecules containing specific signatures, e.g., structural motifs. In other embodiments, the template nucleic acid binding domain (e.g., RNA binding domain) is contained within the reverse transcription domain, e.g., the reverse transcriptase-derived component has a known signature for RNA preference.

[0576] In other embodiments, the template nucleic acid binding domain (e.g., RNA binding domain) is contained within the target DNA binding domain. For example, in some embodiments, the DNA binding domain is a CRISPR-associated protein that recognizes the structure of a template nucleic acid (e.g., template RNA) comprising a gRNA. In some embodiments, a heterologous gene modifying polypeptide comprises a DNA-binding domain comprising a CRISPR-associated protein that associates with a gRNA scaffold that allows the DNA-binding domain to bind a target genomic DNA sequence. In some embodiments, the gRNA scaffold and gRNA spacer is comprised within the template nucleic acid (e.g., template RNA), thus the DNA-binding domain is also the template nucleic acid binding domain. In some embodiments, the polypeptide possesses RNA binding function in multiple domains, e.g., can bind a gRNA structure in a CRISPR-associated DNA binding domain and an additional sequence or structure in a reverse transcriptase domain.

[0577] In some embodiments, the RNA binding domain is capable of binding to a template RNA with greater affinity than a reference RNA binding domain. In some embodiments, the reference RNA binding domain is an RNA binding domain from Cas9 of S. pyogenes. In some embodiments, the RNA binding domain is capable of binding to a template RNA with an affinity between 100 pM-10 nM (e.g., between 100 pM-1 nM or 1 nM-10 nM). In some embodiments, the affinity of a RNA binding domain for its template RNA is measured in vitro, e.g., by thermophoresis, e.g., as described in Asmari et al. Methods 146:107-119 (2018) (incorporated by reference herein in its entirety). In some embodiments, the affinity of a RNA binding domain for its template RNA is measured in cells (e.g., by FRET or CLIP-Seq).

[0578] In some embodiments, the RNA binding domain is associated with the template RNA in vitro at a frequency at least about 5-fold or 10-fold higher than with a scrambled RNA. In some embodiments, the frequency of association between the RNA binding domain and the template RNA or scrambled RNA is measured by CLIP-seq, e.g., as described in Lin and Miles (2019) Nucleic Acids Res 47(11):5490-5501 (incorporated by reference herein in its entirety). In some embodiments, the RNA binding domain is associated with the template RNA in cells (e.g., in HEK293T cells) at a frequency at least about 5-fold or 10-fold higher than with a scrambled RNA. In some embodiments, the frequency of association between the RNA binding domain and the template RNA or scrambled RNA is measured by CLIP-seq, e.g., as described in Lin and Miles (2019), supra.

### Endonuclease Domains and DNA Binding Domains

[0579] In some embodiments, a heterologous gene modifying polypeptide possesses the function of DNA target site cleavage via an endonuclease domain. In some embodiments, a heterologous gene modifying polypeptide comprises a DNA binding domain, e.g., for binding to a target nucleic acid. In some embodiments, a domain (e.g., a Cas domain) of the heterologous gene modifying polypeptide comprises two or more smaller domains, e.g., a DNA binding domain and an endonuclease domain. It is understood that when a DNA binding domain (e.g., a Cas domain) is said to bind to a target nucleic acid sequence, in some embodiments, the binding is mediated by a gRNA.

[0580] In some embodiments, a domain has two functions. For example, in some embodiments, the endonuclease domain is also a DNA-binding domain. In some embodiments, the endonuclease domain is also a template nucleic acid (e.g., template RNA) binding domain. For example, in some embodiments, a polypeptide comprises a CRISPR-associated endonuclease domain that binds a template RNA comprising a gRNA, binds a target DNA sequence (e.g., with complementarity to a portion of the gRNA), and cuts the target DNA sequence. In some embodiments, an endonuclease domain or endonuclease/DNA-binding domain from a heterologous source can be used or can be modified (e.g., by insertion, deletion, or substitution of one or more residues) in a system described herein.

[0581] In some embodiments, a nucleic acid encoding the endonuclease domain or endonuclease/DNA binding domain is altered from its natural sequence to have altered codon usage, e.g. improved for human cells. In some embodiments, the endonuclease element is a heterologous endonuclease element, such as a Cas endonuclease (e.g., Cas9), a type-II restriction endonuclease (e.g., Fok1), a meganuclease (e.g., I-SceI), or other endonuclease domain.

[0582] In certain aspects, the DNA-binding domain of a heterologous gene modifying polypeptide described herein is selected, designed, or constructed for binding to a desired host DNA target sequence. In certain embodiments, the DNA-binding domain of the polypeptide is a heterologous DNA-binding element. In some embodiments the heterologous DNA binding element is a zinc-finger element or a TAL effector element, e.g., a zinc-finger or TAL polypeptide or functional fragment thereof. In some embodiments the heterologous DNA binding element is a sequence-guided DNA binding element, such as Cas9, Cpf1, or other CRISPR-related protein that has been altered to have no endonuclease activity. In some embodiments the heterologous DNA binding element retains endonuclease activity. In some embodiments, the heterologous DNA binding element retains partial endonuclease activity to cleave ssDNA, e.g., possesses nickase activity. In specific embodiments, the heterologous DNA-binding domain can be any one or more of Cas9, TAL domain, ZF domain, Myb domain, combinations thereof, or multiples thereof.

[0583] In some embodiments, DNA-binding domains are modified, for example by site-specific mutation, increasing or decreasing DNA-binding elements (for example, number and/or specificity of zinc fingers), etc., to alter DNA-binding specificity and affinity. In some embodiments a nucleic acid sequence encoding the DNA binding domain is altered from its natural sequence to have altered codon usage, e.g. improved for human cells. In embodiments, the DNA binding domain comprises one or more modifications relative to a wild-type DNA binding domain, e.g., a modification via directed evolution, e.g., phage-assisted continuous evolution (PACE).

[0584] In some embodiments, the DNA binding domain comprises a meganuclease domain (e.g., as described herein, e.g., in the endonuclease domain section), or a functional fragment thereof. In some embodiments, the meganuclease domain possesses endonuclease activity, e.g., double-strand cleavage and/or nickase activity. In other embodiments, the meganuclease domain has reduced activity, e.g., lacks endonuclease activity, e.g., the meganuclease is catalytically inactive. In some embodiments, a catalytically inactive meganuclease is used as a DNA binding domain, e.g., as described in Fonfara et al. Nucleic Acids Res 40(2):847-860 (2012), incorporated herein by reference in its entirety.

[0585] In some embodiments, a heterologous gene modifying polypeptide comprises a modification to a DNA-binding domain, e.g., relative to the wild-type polypeptide. In some embodiments, the DNA-binding domain comprises an addition, deletion, replacement, or modification to the amino acid sequence of the original DNA-binding domain. In some embodiments, the DNA-binding domain is modified to include a heterologous functional domain that binds specifically to a target nucleic acid (e.g., DNA) sequence of interest. In some embodiments, the functional domain replaces at least a portion (e.g., the entirety of) the prior DNA-binding domain of the polypeptide. In some embodiments, the functional domain comprises a zinc finger (e.g., a zinc finger that specifically binds to the target nucleic acid (e.g., DNA) sequence of interest. In some embodiments, the functional domain comprises a Cas domain (e.g., a Cas domain that specifically binds to the target nucleic acid (e.g., DNA) sequence of interest. In some embodiments, the Cas domain comprises a Cas9 or a mutant or variant thereof (e.g., as described herein). In embodiments, the Cas domain is associated with a guide RNA (gRNA), e.g., as described herein. In embodiments, the Cas domain is directed to a target nucleic acid (e.g., DNA) sequence of interest by the gRNA. In embodiments, the Cas domain is encoded in the same nucleic acid (e.g., RNA) molecule as the gRNA. In embodiments, the Cas domain is encoded in a different nucleic acid (e.g., RNA) molecule from the gRNA.

[0586] In some embodiments, the DNA binding domain is capable of binding to a target sequence (e.g., a dsDNA target sequence) with greater affinity than a reference DNA binding domain. In some embodiments, the reference DNA binding domain is a DNA binding domain from Cas9 of S. pyogenes. In some embodiments, the DNA binding domain is capable of binding to a target sequence (e.g., a dsDNA target sequence) with an affinity between 100 pM-10 nM (e.g., between 100 pM-1 nM or 1 nM-10 nM).

[0587] In some embodiments, the affinity of a DNA binding domain for its target sequence (e.g., dsDNA target sequence) is measured in vitro, e.g., by thermophoresis, e.g., as described in Asmari et al. Methods 146:107-119 (2018) (incorporated by reference herein in its entirety).

[0588] In embodiments, the DNA binding domain is capable of binding to its target sequence (e.g., dsDNA target sequence), e.g, with an affinity between 100 pM-10 nM (e.g., between 100 pM-1 nM or 1 nM-10 nM) in the presence of a molar excess of scrambled sequence competitor dsDNA, e.g., of about 100-fold molar excess.

[0589] In some embodiments, the DNA binding domain is found associated with its target sequence (e.g., dsDNA target sequence) more frequently than any other sequence in the genome of a target cell, e.g., human target cell, e.g., as measured by ChIP-seq (e.g., in HEK293T cells), e.g., as described in He and Pu (2010) Curr. Protoc Mol Biol Chapter 21 (incorporated herein by reference in its entirety). In some embodiments, the DNA binding domain is found associated with its target sequence (e.g., dsDNA target sequence) at least about 5-fold or 10-fold, more frequently than any other sequence in the genome of a target cell, e.g., as measured by ChIP-seq (e.g., in HEK293T cells), e.g., as described in He and Pu (2010), supra.

[0590] In some embodiments, the endonuclease domain has nickase activity and cleaves one strand of a target DNA. In some embodiments, nickase activity reduces the formation of double-stranded breaks at the target site. In some embodiments, the endonuclease domain creates a staggered nick structure in the first and second strands of a target DNA. In some embodiments, a staggered nick structure generates free 3′ overhangs at the target site. In some embodiments, free 3′ overhangs at the target site improve editing efficiency, e.g., by enhancing access and annealing of a 3′ homology region of a template nucleic acid. In some embodiments, a staggered nick structure reduces the formation of double-stranded breaks at the target site.

[0591] In some embodiments, the endonuclease domain cleaves both strands of a target DNA, e.g., results in blunt-end cleavage of a target with no ssDNA overhangs on either side of the cut-site. The amino acid sequence of an endonuclease domain of a system described herein may be at least about 50%, at least about 60%, at least about 70%, at least about 80%, at least about 85%, at least about 90%, at least about 95%, at least about 96%, at least about 97%, at least about 98%, at least about 99% identical to the amino acid sequence of an endonuclease domain described herein, e.g., an endonuclease domain from Table 8A.

[0592] In certain embodiments, the heterologous endonuclease is Fok1 or a functional fragment thereof. In certain embodiments, the heterologous endonuclease is a Holliday junction resolvase or homolog thereof, such as the Holliday junction resolving enzyme from Sulfolobus solfataricus—Ssol Hje (Govindaraju et al., Nucleic Acids Research 44:7, 2016). In certain embodiments, the heterologous endonuclease is the endonuclease of the large fragment of a spliceosomal protein, such as Prp8 (Mahbub et al., Mobile DNA 8:16, 2017). In certain embodiments, the heterologous endonuclease is derived from a CRISPR-associated protein, e.g., Cas9. In certain embodiments, the heterologous endonuclease is engineered to have only ssDNA cleavage activity, e.g., only nickase activity, e.g., be a Cas9 nickase, e.g., SpCas9 with D10A, H840A, or N863A mutations. Table 8A provides exemplary Cas proteins and mutations associated with nickase activity. In still other embodiments, homologous endonuclease domains are modified, for example by site-specific mutation, to alter DNA endonuclease activity. In still other embodiments, endonuclease domains are modified to reduce DNA-sequence specificity, e.g., by truncation to remove domains that confer DNA-sequence specificity or mutation to inactivate regions conferring DNA-sequence specificity.

[0593] In some embodiments, the endonuclease domain has nickase activity and does not form double-stranded breaks. In some embodiments, the endonuclease domain forms single-stranded breaks at a higher frequency than double-stranded breaks, e.g., at least 90%, 95%, 96%, 97%, 98%, or 99% of the breaks are single-stranded breaks, or less than 10%, 5%, 4%, 3%, 2%, or 1% of the breaks are double-stranded breaks. In some embodiments, the endonuclease forms substantially no double-stranded breaks. In some embodiments, the endonuclease does not form detectable levels of double-stranded breaks.

[0594] In some embodiments, the endonuclease domain has nickase activity that nicks the target site DNA of the first strand; e.g., in some embodiments, the endonuclease domain cuts the genomic DNA of the target site near to the site of alteration on the strand that will be extended by the writing domain. In some embodiments, the endonuclease domain has nickase activity that nicks the target site DNA of the first strand and does not nick the target site DNA of the second strand. For example, when a polypeptide comprises a CRISPR-associated endonuclease domain having nickase activity, in some embodiments, said CRISPR-associated endonuclease domain nicks the target site DNA strand containing the PAM site (e.g., and does not nick the target site DNA strand that does not contain the PAM site). As a further example, when a polypeptide comprises a CRISPR-associated endonuclease domain having nickase activity, in some embodiments, said CRISPR-associated endonuclease domain nicks the target site DNA strand not containing the PAM site (e.g., and does not nick the target site DNA strand that contains the PAM site).

[0595] In some other embodiments, the endonuclease domain has nickase activity that nicks the target site DNA of the first strand and the second strand. Without wishing to be bound by theory, after a writing domain (e.g., RT domain) of a polypeptide described herein polymerizes (e.g., reverse transcribes) from the heterologous object sequence of a template nucleic acid (e.g., template RNA), the cellular DNA repair machinery must repair the nick on the first DNA strand. The target site DNA now contains two different sequences for the first DNA strand: one corresponding to the original genomic DNA (e.g., having a free 5′ end) and a second corresponding to that polymerized from the heterologous object sequence (e.g., having a free 3′ end). It is thought that the two different sequences equilibrate with one another, first one hybridizing the second strand, then the other, and which sequence the cellular DNA repair apparatus incorporates into its repaired target site may be a stochastic process. Without wishing to be bound by theory, it is thought that introducing an additional nick to the second-strand may bias the cellular DNA repair machinery to adopt the heterologous object sequence-based sequence more frequently than the original genomic sequence (Anzalone et al. Nature 576:149-157 (2019)). In some embodiments, the additional nick is positioned at least 10, 15, 20, 25, 30, 35, 40, 45, 50, 55, 60, 65, 70, 75, 80, 85, 90, 95, 100, 105, 110, 115, 120, 125, 130, 135, 140, 145, or 150 nucleotides 5′ or 3′ of the target site modification (e.g., the insertion, deletion, or substitution) or to the nick on the first strand.

[0596] Alternatively or additionally, without wishing to be bound by theory, it is thought that an additional nick to the second strand may promote second-strand synthesis. In some embodiments, where the system has inserted or substituted a portion of the first strand, synthesis of a new sequence corresponding to the insertion/substitution in the second strand is necessary.

[0597] In some embodiments, the polypeptide comprises a single domain having endonuclease activity (e.g., a single endonuclease domain) and said domain nicks both the first strand and the second strand. For example, in such an embodiment the endonuclease domain may be a CRISPR-associated endonuclease domain, and the template nucleic acid (e.g., template RNA) comprises a gRNA spacer that directs nicking of the first strand and an additional gRNA spacer that directs nicking of the second strand. In some embodiments, the polypeptide comprises a plurality of domains having endonuclease activity, and a first endonuclease domain nicks the first strand and a second endonuclease domain nicks the second strand (optionally, the first endonuclease domain does not (e.g., cannot) nick the second strand and the second endonuclease domain does not (e.g., cannot) nick the first strand).

[0598] In some embodiments, the endonuclease domain is capable of nicking a first strand and a second strand. In some embodiments, the first and second strand nicks occur at the same position in the target site but on opposite strands. In some embodiments, the second strand nick occurs in a staggered location, e.g., upstream or downstream, from the first nick. In some embodiments, the endonuclease domain generates a target site deletion if the second strand nick is upstream of the first strand nick. In some embodiments, the endonuclease domain generates a target site duplication if the second strand nick is downstream of the first strand nick. In some embodiments, the endonuclease domain generates no duplication and/or deletion if the first and second strand nicks occur in the same position of the target site. In some embodiments, the endonuclease domain has altered activity depending on protein conformation or RNA-binding status, e.g., which promotes the nicking of the first or second strand (e.g., as described in Christensen et al. PNAS 2006; incorporated by reference herein in its entirety).

[0599] In some embodiments, the endonuclease domain comprises a meganuclease, or a functional fragment thereof. In some embodiments, the endonuclease domain comprises a homing endonuclease, or a functional fragment thereof. In some embodiments, the endonuclease domain comprises a meganuclease from the LAGLIDADG (SEQ ID NO: 15432), GIY-YIG, HNH, His-Cys Box, or PD-(D/E) XK families, or a functional fragment or variant thereof, e.g., which possess conserved amino acid motifs, e.g., as indicated in the family names. In some embodiments, the endonuclease domain comprises a meganuclease, or fragment thereof, chosen from, e.g., I-SmaMI (Uniprot F7WD42), I-SceI (Uniprot P03882), I-Anil (Uniprot P03880), I-DmoI (Uniprot P21505), I-CreI (Uniprot P05725), I-TevI (Uniprot P13299), I-OnuI (Uniprot Q4VWW5), or I-BmoI (Uniprot Q9ANR6). In some embodiments, the meganuclease is naturally monomeric, e.g., I-SceI, I-TevI, or dimeric, e.g., I-CreI, in its functional form. For example, the LAGLIDADG meganucleases (SEQ ID NO: 15432) with a single copy of the LAGLIDADG motif (SEQ ID NO: 15432) generally form homodimers, whereas members with two copies of the LAGLIDADG motif (SEQ ID NO: 15432) are generally found as monomers. In some embodiments, a meganuclease that normally forms as a dimer is expressed as a fusion, e.g., the two subunits are expressed as a single ORF and, optionally, connected by a linker, e.g., an I-CreI dimer fusion (Rodriguez-Fornes et al. Gene Therapy 2020; incorporated by reference herein in its entirety). In some embodiments, a meganuclease, or a functional fragment thereof, is altered to favor nickase activity for one strand of a double-stranded DNA molecule, e.g., I-SceI (K122I and/or K223I) (Niu et al. J Mol Biol 2008), I-Anil (K227M) (McConnell Smith et al. PNAS 2009), I-DmoI (Q42A and/or K120M) (Molina et al. J Biol Chem 2015). In some embodiments, a meganuclease or functional fragment thereof possessing this preference for single-strand cleavage is used as an endonuclease domain, e.g., with nickase activity. In some embodiments, an endonuclease domain comprises a meganuclease, or a functional fragment thereof, which naturally targets or is engineered to target a safe harbor site, e.g., an I-CreI targeting SH6 site (Rodriguez-Fornes et al., supra). In some embodiments, an endonuclease domain comprises a meganuclease, or a functional fragment thereof, with a sequence tolerant catalytic domain, e.g., I-TevI recognizing the minimal motif CNNNG (Kleinstiver et al. PNAS 2012). In some embodiments, a target sequence tolerant catalytic domain is fused to a DNA binding domain, e.g., to direct activity, e.g., by fusing I-TevI to: (i) zinc fingers to create Tev-ZFEs (Kleinstiver et al. PNAS 2012), (ii) other meganucleases to create MegaTevs (Wolfs et al. Nucleic Acids Res 2014), and/or (iii) Cas9 to create TevCas9 (Wolfs et al. PNAS 2016).

[0600] In some embodiments, the endonuclease domain comprises a restriction enzyme, e.g., a Type IIS or Type IIP restriction enzyme. In some embodiments, the endonuclease domain comprises a Type IIS restriction enzyme, e.g., FokI, or a fragment or variant thereof. In some embodiments, the endonuclease domain comprises a Type IIP restriction enzyme, e.g., PvuII, or a fragment or variant thereof. In some embodiments, a dimeric restriction enzyme is expressed as a fusion such that it functions as a single chain, e.g., a FokI dimer fusion (Minczuk et al. Nucleic Acids Res 36(12):3926-3938 (2008)).

[0601] The use of additional endonuclease domains is described, for example, in Guha and Edgell Int J Mol Sci 18(22):2565 (2017), which is incorporated herein by reference in its entirety.

[0602] In some embodiments, a heterologous gene modifying polypeptide comprises a modification to an endonuclease domain, e.g., relative to a wild-type Cas protein. In some embodiments, the endonuclease domain comprises an addition, deletion, replacement, or modification to the amino acid sequence of the wild-type Cas protein. In some embodiments, the endonuclease domain is modified to include a heterologous functional domain that binds specifically to and/or induces endonuclease cleavage of a target nucleic acid (e.g., DNA) sequence of interest. In some embodiments, the endonuclease domain comprises a zinc finger. In embodiments, the endonuclease domain comprising the Cas domain is associated with a guide RNA (gRNA), e.g., as described herein. In some embodiments, the endonuclease domain is modified to include a functional domain that does not target a specific target nucleic acid (e.g., DNA) sequence. In embodiments, the endonuclease domain comprises a Fok1 domain.

[0603] In some embodiments, the endonuclease domain is associated with the target dsDNA in vitro at a frequency at least about 5-fold or 10-fold higher than with a scrambled dsDNA. In some embodiments, the endonuclease domain is associated with the target dsDNA in vitro at a frequency at least about 5-fold or 10-fold higher than with a scrambled dsDNA, e.g., in a cell (e.g., a HEK293T cell). In some embodiments, the frequency of association between the endonuclease domain and the target DNA or scrambled DNA is measured by ChIP-seq, e.g., as described in He and Pu (2010) Curr. Protoc Mol Biol Chapter 21 (incorporated by reference herein in its entirety).

[0604] In some embodiments, the endonuclease domain can catalyze the formation of a nick at a target sequence, e.g., to an increase of at least about 5-fold or 10-fold relative to a non-target sequence (e.g., relative to any other genomic sequence in the genome of the target cell). In some embodiments, the level of nick formation is determined using NickSeq, e.g., as described in Elacqua et al. (2019) bioRxiv doi.org/10.1101/867937 (incorporated herein by reference in its entirety).

[0605] In some embodiments, the endonuclease domain is capable of nicking DNA in vitro. In embodiments, the nick results in an exposed base. In embodiments, the exposed base can be detected using a nuclease sensitivity assay, e.g., as described in Chaudhry and Weinfeld (1995) Nucleic Acids Res 23(19):3805-3809 (incorporated by reference herein in its entirety). In embodiments, the level of exposed bases (e.g., detected by the nuclease sensitivity assay) is increased by at least 10%, 50%, or more relative to a reference endonuclease domain. In some embodiments, the reference endonuclease domain is an endonuclease domain from Cas9 of S. pyogenes.

[0606] In some embodiments, the endonuclease domain is capable of nicking DNA in a cell. In embodiments, the endonuclease domain is capable of nicking DNA in a HEK293T cell. In embodiments, an unrepaired nick that undergoes replication in the absence of Rad51 results in increased NHEJ rates at the site of the nick, which can be detected, e.g., by using a Rad51 inhibition assay, e.g., as described in Bothmer et al. (2017) Nat Commun 8:13905 (incorporated by reference herein in its entirety). In embodiments, NHEJ rates are increased above 0-5%. In embodiments, NHEJ rates are increased to 20-70% (e.g., between 30%-60% or 40-50%), e.g., upon Rad51 inhibition.

[0607] In some embodiments, the endonuclease domain releases the target after cleavage. In some embodiments, release of the target is indicated indirectly by assessing for multiple turnovers by the enzyme, e.g., as described in Yourik at al. RNA 25(1):35-44 (2019) (incorporated herein by reference in its entirety) and shown in FIG. 2. In some embodiments, the kₑₓₚ of an endonuclease domain is 1×10⁻³-1×10⁻5 min−1 as measured by such methods.

[0608] In some embodiments, the endonuclease domain has a catalytic efficiency (k_{cat}/Kₘ) greater than about 1×10⁸ s⁻¹ M⁻¹ in vitro. In embodiments, the endonuclease domain has a catalytic efficiency greater than about 1×10⁵, 1×10⁶, 1×10⁷, or 1×10⁸, s⁻¹ M⁻¹ in vitro. In embodiments, catalytic efficiency is determined as described in Chen et al. (2018) Science 360(6387):436-439 (incorporated herein by reference in its entirety). In some embodiments, the endonuclease domain has a catalytic efficiency (k_{cat}/Kₘ) greater than about 1×10⁸ s⁻¹ M⁻¹ in cells. In embodiments, the endonuclease domain has a catalytic efficiency greater than about 1×10⁵, 1×10⁶, 1×10⁷, or 1×10⁸ s⁻¹ M⁻¹ in cells.

### Heterologous Gene Modifying Polypeptides Comprising Cas Domains

[0609] In some embodiments, a heterologous gene modifying polypeptide described herein comprises a Cas domain. In some embodiments, the Cas domain can direct the heterologous gene modifying polypeptide to a target site specified by a gRNA spacer, thereby modifying a target nucleic acid sequence in “cis”. In some embodiments, a heterologous gene modifying polypeptide is fused to a Cas domain. In some embodiments, a heterologous gene modifying polypeptide comprises a CRISPR/Cas domain (also referred to herein as a CRISPR-associated protein). In some embodiments, a CRISPR/Cas domain comprises a protein involved in the clustered regulatory interspaced short palindromic repeat (CRISPR) system, e.g., a Cas protein, and optionally binds a guide RNA, e.g., single guide RNA (sgRNA).

[0610] CRISPR systems are adaptive defense systems originally discovered in bacteria and archaea. CRISPR systems use RNA-guided nucleases termed CRISPR-associated or “Cas” endonucleases (e.g., Cas9 or Cpf1) to cleave foreign DNA. For example, in a typical CRISPR-Cas system, an endonuclease is directed to a target nucleotide sequence (e.g., a site in the genome that is to be sequence-edited) by sequence-specific, non-coding “guide RNAs” that target single- or double-stranded DNA sequences. Three classes (I-III) of CRISPR systems have been identified. The class II CRISPR systems use a single Cas endonuclease (rather than multiple Cas proteins). One class II CRISPR system includes a type II Cas endonuclease such as Cas9, a CRISPR RNA (“crRNA”), and a trans-activating crRNA (“tracrRNA”). The crRNA contains a “spacer” sequence, a typically about 20-nucleotide RNA sequence that corresponds to a target DNA sequence (“protospacer”). In the wild-type system, and in some engineered systems, crRNA also contains a region that binds to the tracrRNA to form a partially double-stranded structure that is cleaved by RNase III, resulting in a crRNA/tracrRNA hybrid molecule. A crRNA/tracrRNA hybrid then directs the Cas endonuclease to recognize and cleave a target DNA sequence. A target DNA sequence is generally adjacent to a “protospacer adjacent motif” (“PAM”) that is specific for a given Cas endonuclease and required for cleavage activity at a target site matching the spacer of the crRNA. CRISPR endonucleases identified from various prokaryotic species have unique PAM sequence requirements, e.g., as listed for exemplary Cas enzymes in Table 7; examples of PAM sequences include 5′-NGG (Streptococcus pyogenes), 5′-NNAGAA (Streptococcus thermophilus CRISPR1), 5′-NGGNG (Streptococcus thermophilus CRISPR3), and 5′-NNNGATT (Neisseria meningiditis). Some endonucleases, e.g., Cas9 endonucleases, are associated with G-rich PAM sites, e.g., 5′-NGG, and perform blunt-end cleaving of the target DNA at a location 3 nucleotides upstream from (5′ from) the PAM site. Another class II CRISPR system includes the type V endonuclease Cpf1, which is smaller than Cas9; examples include AsCpf1 (from Acidaminococcus sp.) and LbCpf1 (from Lachnospiraceae sp.). Cpf1-associated CRISPR arrays are processed into mature crRNAs without the requirement of a tracrRNA; in other words, a Cpf1 system, in some embodiments, comprises only Cpf1 nuclease and a crRNA to cleave a target DNA sequence. Cpf1 endonucleases, are typically associated with T-rich PAM sites, e.g., 5′-TTN. Cpf1 can also recognize a 5′-CTA PAM motif. Cpf1 typically cleaves a target DNA by introducing an offset or staggered double-strand break with a 4- or 5-nucleotide 5′ overhang, for example, cleaving a target DNA with a 5-nucleotide offset or staggered cut located 18 nucleotides downstream from (3′ from) from a PAM site on the coding strand and 23 nucleotides downstream from the PAM site on the complimentary strand; the 5-nucleotide overhang that results from such offset cleavage allows more precise genome editing by DNA insertion by homologous recombination than by insertion at blunt-end cleaved DNA. See, e.g., Zetsche et al. (2015) Cell, 163:759-771.

[0611] A variety of CRISPR associated (Cas) genes or proteins can be used in the technologies provided by the present disclosure and the choice of Cas protein will depend upon the particular conditions of the method. Specific examples of Cas proteins include class II systems including Cas1, Cas2, Cas3, Cas4, Cas5, Cas6, Cas7, Cas8, Cas9, Cas10, Cpf1, C2C1, or C2C3. In some embodiments, a Cas protein, e.g., a Cas9 protein, may be from any of a variety of prokaryotic species. In some embodiments a particular Cas protein, e.g., a particular Cas9 protein, is selected to recognize a particular protospacer-adjacent motif (PAM) sequence. In some embodiments, a DNA-binding domain or endonuclease domain includes a sequence targeting polypeptide, such as a Cas protein, e.g., Cas9. In certain embodiments a Cas protein, e.g., a Cas9 protein, may be obtained from a bacteria or archaea or synthesized using known methods. In certain embodiments, a Cas protein may be from a gram-positive bacteria or a gram-negative bacteria. In certain embodiments, a Cas protein may be from a Streptococcus (e.g., a S. pyogenes, or a S. thermophilus), a Francisella (e.g., an F. novicida), a Staphylococcus (e.g., an S. aureus), an Acidaminococcus (e.g., an Acidaminococcus sp. BV3L6), a Neisseria (e.g., an N. meningitidis), a Cryptococcus, a Corynebacterium, a Haemophilus, a Eubacterium, a Pasteurella, a Prevotella, a Veillonella, or a Marinobacter.

[0612] In some embodiments, a heterologous gene modifying polypeptide may comprise the amino acid sequence of SEQ ID NO: 4000 below, or a sequence having at least 70%, 75%, 80%, 85%, 90%, 95%, 96%, 97%, 98%, 99% identity thereto. In embodiments, the amino acid sequence of SEQ ID NO: 4000 below, or the sequence having at least 70%, 75%, 80%, 85%, 90%, 95%, 96%, 97%, 98%, 99% identity thereto, is positioned at the N-terminal end of the heterologous gene modifying polypeptide. In embodiments, the amino acid sequence of SEQ ID NO: 4000 below, or the sequence having at least 70%, 75%, 80%, 85%, 90%, 95%, 96%, 97%, 98%, 99% identity thereto, is positioned within 1, 2, 3, 4, 5, 6, 7, 8, 9, 10, 15, 20, 25, or 30 amino acids of the N-terminal end of the heterologous gene modifying polypeptide.

Exemplary N-terminal NLS-Cas9 domain
(SEQ ID NO: 4000)
MPAAKRVKLDGGDKKYSIGLDIGTNSVGWAVITDEYKVPSKKFKVLGNTDRHSI
KKNLIGALLFDSGETAEATRLKRTARRRYTRRKNRICYLQEIFSNEMAKVDDSFFHRLEE
SFLVEEDKKHERHPIFGNIVDEVAYHEKYPTIYHLRKKLVDSTDKADLRLIYLALAHMIK
FRGHFLIEGDLNPDNSDVDKLFIQLVQTYNQLFEENPINASGVDAKAILSARLSKSRRLE
NLIAQLPGEKKNGLFGNLIALSLGLTPNFKSNFDLAEDAKLQLSKDTYDDDLDNLLAQIG
DQYADLFLAAKNLSDAILLSDILRVNTEITKAPLSASMIKRYDEHHQDLTLLKALVRQQL
PEKYKEIFFDQSKNGYAGYIDGGASQEEFYKFIKPILEKMDGTEELLVKLNREDLLRKQR
TFDNGSIPHQIHLGELHAILRRQEDFYPFLKDNREKIEKILTFRIPYYVGPLARGNSRFAW
MTRKSEETITPWNFEEVVDKGASAQSFIERMTNFDKNLPNEKVLPKHSLLYEYFTVYNE
LTKVKYVTEGMRKPAFLSGEQKKAIVDLLFKTNRKVTVKQLKEDYFKKIECFDSVEISG
VEDRFNASLGTYHDLLKIIKDKDFLDNEENEDILEDIVLTLTLFEDREMIEERLKTYAHLF
DDKVMKQLKRRRYTGWGRLSRKLINGIRDKQSGKTILDFLKSDGFANRNFMQLIHDDS
LTFKEDIQKAQVSGQGDSLHEHIANLAGSPAIKKGILQTVKVVDELVKVMGRHKPENIVI
EMARENQTTQKGQKNSRERMKRIEEGIKELGSQILKEHPVENTQLQNEKLYLYYLQNGR
DMYVDQELDINRLSDYDVDHIVPQSFLKDDSIDNKVLTRSDKARGKSDNVPSEEVVKK
MKNYWRQLLNAKLITQRKFDNLTKAERGGLSELDKAGFIKRQLVETRQITKHVAQILDS
RMNTKYDENDKLIREVKVITLKSKLVSDFRKDFQFYKVREINNYHHAHDAYLNAVVGT
ALIKKYPKLESEFVYGDYKVYDVRKMIAKSEQEIGKATAKYFFYSNIMNFFKTEITLANG
EIRKRPLIETNGETGEIVWDKGRDFATVRKVLSMPQVNIVKKTEVQTGGFSKESILPKRN
SDKLIARKKDWDPKKYGGFDSPTVAYSVLVVAKVEKGKSKKLKSVKELLGITIMERSSF
EKNPIDFLEAKGYKEVKKDLIIKLPKYSLFELENGRKRMLASAGELQKGNELALPSKYV
NFLYLASHYEKLKGSPEDNEQKQLFVEQHKHYLDEIIEQISEFSKRVILADANLDKVLSA
YNKHRDKPIREQAENIIHLFTLTNLGAPAAFKYFDTTIDRKRYTSTKEVLDATLIHQSITG
LYETRIDLSQLGGDGG

[0613] In some embodiments, a heterologous gene modifying polypeptide may comprise the amino acid sequence of SEQ ID NO: 4001 below, or a sequence having at least 70%, 75%, 80%, 85%, 90%, 95%, 96%, 97%, 98%, 99% identity thereto. In embodiments, the amino acid sequence of SEQ ID NO: 4001 below, or the sequence having at least 70%, 75%, 80%, 85%, 90%, 95%, 96%, 97%, 98%, 99% identity thereto, is positioned at the C-terminal end of the heterologous gene modifying polypeptide. In embodiments, the amino acid sequence of SEQ ID NO: 4001 below, or the sequence having at least 70%, 75%, 80%, 85%, 90%, 95%, 96%, 97%, 98%, 99% identity thereto, is positioned within 1, 2, 3, 4, 5, 6, 7, 8, 9, 10, 15, 20, 25, or 30 amino acids of the C-terminal end of the heterologous gene modifying polypeptide.

Exemplary C-terminal sequence comprising an NLS
(SEQ ID NO: 4001)
AGKRTADGSEFEKRTADGSEFESPKKKAKVE
Exemplary benchmarking sequence
(SEQ ID NO: 4002)
MPAAKRVKLDGGDKKYSIGLDIGTNSVGWAVITDEYKVPSKKFKVLGNTDRHSI
KKNLIGALLFDSGETAEATRLKRTARRRYTRRKNRICYLQEIFSNEMAKVDDSFFHRLEE
SFLVEEDKKHERHPIFGNIVDEVAYHEKYPTIYHLRKKLVDSTDKADLRLIYLALAHMIK
FRGHFLIEGDLNPDNSDVDKLFIQLVQTYNQLFEENPINASGVDAKAILSARLSKSRRLE
NLIAQLPGEKKNGLFGNLIALSLGLTPNFKSNFDLAEDAKLQLSKDTYDDDLDNLLAQIG
DQYADLFLAAKNLSDAILLSDILRVNTEITKAPLSASMIKRYDEHHQDLTLLKALVRQQL
PEKYKEIFFDQSKNGYAGYIDGGASQEEFYKFIKPILEKMDGTEELLVKLNREDLLRKQR
TFDNGSIPHQIHLGELHAILRRQEDFYPFLKDNREKIEKILTFRIPYYVGPLARGNSRFAW
MTRKSEETITPWNFEEVVDKGASAQSFIERMTNFDKNLPNEKVLPKHSLLYEYFTVYNE
LTKVKYVTEGMRKPAFLSGEQKKAIVDLLFKTNRKVTVKQLKEDYFKKIECFDSVEISG
VEDRFNASLGTYHDLLKIIKDKDFLDNEENEDILEDIVLTLTLFEDREMIEERLKTYAHLF
DDKVMKQLKRRRYTGWGRLSRKLINGIRDKQSGKTILDFLKSDGFANRNFMQLIHDDS
LTFKEDIQKAQVSGQGDSLHEHIANLAGSPAIKKGILQTVKVVDELVKVMGRHKPENIVI
EMARENQTTQKGQKNSRERMKRIEEGIKELGSQILKEHPVENTQLQNEKLYLYYLQNGR
DMYVDQELDINRLSDYDVDHIVPQSFLKDDSIDNKVLTRSDKARGKSDNVPSEEVVKK
MKNYWRQLLNAKLITQRKFDNLTKAERGGLSELDKAGFIKRQLVETRQITKHVAQILDS
RMNTKYDENDKLIREVKVITLKSKLVSDFRKDFQFYKVREINNYHHAHDAYLNAVVGT
ALIKKYPKLESEFVYGDYKVYDVRKMIAKSEQEIGKATAKYFFYSNIMNFFKTEITLANG
EIRKRPLIETNGETGEIVWDKGRDFATVRKVLSMPQVNIVKKTEVQTGGFSKESILPKRN
SDKLIARKKDWDPKKYGGFDSPTVAYSVLVVAKVEKGKSKKLKSVKELLGITIMERSSF
EKNPIDFLEAKGYKEVKKDLIIKLPKYSLFELENGRKRMLASAGELQKGNELALPSKYV
NFLYLASHYEKLKGSPEDNEQKQLFVEQHKHYLDEIIEQISEFSKRVILADANLDKVLSA
YNKHRDKPIREQAENIIHLFTLTNLGAPAAFKYFDTTIDRKRYTSTKEVLDATLIHQSITG
LYETRIDLSQLGGDGGSGGSSGGSSGSETPGTSESATPESSGGSSGGSSGGTLNIEDEYRL
HETSKEPDVSLGSTWLSDFPQAWAETGGMGLAVRQAPLIIPLKATSTPVSIKQYPMSQE
ARLGIKPHIQRLLDQGILVPCQSPWNTPLLPVKKPGTNDYRPVQDLREVNKRVEDIHPTV
PNPYNLLSGLPPSHQWYTVLDLKDAFFCLRLHPTSQPLFAFEWRDPEMGISGQLTWTRL
PQGFKNSPTLFNEALHRDLADFRIQHPDLILLQYVDDLLLAATSELDCQQGTRALLQTLG
NLGYRASAKKAQICQKQVKYLGYLLKEGQRWLTEARKETVMGQPTPKTPRQLREFLG
KAGFCRLFIPGFAEMAAPLYPLTKPGTLFNWGPDQQKAYQEIKQALLTAPALGLPDLTK
PFELFVDEKQGYAKGVLTQKLGPWRRPVAYLSKKLDPVAAGWPPCLRMVAAIAVLTK
DAGKLTMGQPLVILAPHAVEALVKQPPDRWLSNARMTHYQALLLDTDRVQFGPVVAL
NPATLLPLPEEGLQHNCLDILAEAHGTRPDLTDQPLPDADHTWYTDGSSLLQEGQRKAG
AAVTTETEVIWAKALPAGTSAQRAELIALTQALKMAEGKKLNVYTDSRYAFATAHIHG
EIYRRRGWLTSEGKEIKNKDEILALLKALFLPKRLSIIHCPGHQKGHSAEARGNRMADQA
ARKAAITETPDTSTLLIENSSPSGGSKRTADGSEFEAGKRTADGSEFEKRTADGSEFESPK
KKAKVE

[0614] In some embodiments, a heterologous gene modifying polypeptide may comprise a Cas domain as listed in Table 7 or 8, or a functional fragment thereof, or a sequence having at least 70%, 75%, 80%, 85%, 90%, 95%, 96%, 97%, 98%, 99% identity thereto.

TABLE 7
CRISPR/Cas Proteins, Species, and Mutations

| | | | # of | | Mutations to alter | Mutations to make |
|---|---|---|---|---|---|---|
| Name | Enzyme | Species | AAs | PAM | PAM recognition | catalytically dead |
| FnCas9 | Cas9 | Francisella | 1629 | 5′-NGG-3′ | Wt | D11A/H969A/N995A |
| | | novicida | | | | |
| FnCas9 | Cas9 | Francisella | 1629 | 5′-YG-3′ | E1369R/E1449H/R1556A | D11A/H969A/N995A |
| RHA | | novicida | | | | |
| SaCas9 | Cas9 | Staphylococcus | 1053 | 5′-NNGRRT-3′ | Wt | D10A/H557A |
| | | aureus | | | | |
| SaCas9 | Cas9 | Staphylococcus | 1053 | 5′-NNNRRT-3′ | E782K/N968K/R1015H | D10A/H557A |
| KKH | | aureus | | | | |
| SpCas9 | Cas9 | Streptococcus | 1368 | 5′-NGG-3′ | Wt | D10A/D839A/H840A/N863A |
| | | pyogenes | | | | |
| SpCas9 | Cas9 | Streptococcus | 1368 | 5′-NGA-3′ | D1135V/R1335Q/T1337R | D10A/D839A/H840A/N863A |
| VQR | | pyogenes | | | | |
| AsCpf1 | Cpf1 | Acidaminococcus | 1307 | 5′-TYCV-3′ | S542R/K607R | E993A |
| RR | | sp. BV3L6 | | | | |
| AsCpf1 | Cpf1 | Acidaminococcus | 1307 | 5′-TATV-3′ | S542R/K548V/N552R | E993A |
| RVR | | sp. BV3L6 | | | | |
| FnCpf1 | Cpf1 | Francisella | 1300 | 5′-NTTN-3′ | Wt | D917A/E1006A/D1255A |
| | | novicida | | | | |
| NmCas9 | Cas9 | Neisseria | 1082 | 5′-NNNGATT-3′ | Wt | D16A/D587A/H588A/N611A |
| | | meningitidis | | | | |

TABLE 8A
Amino Acid Sequences of CRISPR/Cas Proteins, Species, and Mutations

| | Parental | | SEQ ID | | | |
|---|---|---|---|---|---|---|
| Variant | Host(s) | Protein Sequence | NO: | (HNH) | (HNH) | (RuvC) |
| Nme2Cas9 | Neisseria | MAAFKPNPINYILGLDIGIASVGWAMVEIDEEENPIRLIDLGVR | 9,001 | N611A | H588A | D16A |
| | meningitidis | VFERAEVPKTGDSLAMARRLARSVRRLTRRRAHRLLRARRLL | | | | |
| | | KREGVLQAADFDENGLIKSLPNTPWQLRAAALDRKLTPLEWS | | | | |
| | | AVLLHLIKHRGYLSQRKNEGETADKELGALLKGVANNAHAL | | | | |
| | | QTGDFRTPAELALNKFEKESGHIRNQRGDYSHTFSRKDLQAE | | | | |
| | | LILLFEKQKEFGNPHVSGGLKEGIETLLMTQRPALSGDAVQK | | | | |
| | | MLGHCTFEPAEPKAAKNTYTAERFIWLTKLNNLRILEQGSERP | | | | |
| | | LTDTERATLMDEPYRKSKLTYAQARKLLGLEDTAFFKGLRY | | | | |
| | | GKDNAEASTLMEMKAYHAISRALEKEGLKDKKSPLNLSSELQ | | | | |
| | | DEIGTAFSLFKTDEDITGRLKDRVQPEILEALLKHISFDKFVQIS | | | | |
| | | LKALRRIVPLMEQGKRYDEACAEIYGDHYGKKNTEEKIYLPPI | | | | |
| | | PADEIRNPVVLRALSQARKVINGVVRRYGSPARIHIETAREVG | | | | |
| | | KSFKDRKEIEKRQEENRKDREKAAAKFREYFPNFVGEPKSKDI | | | | |
| | | LKLRLYEQQHGKCLYSGKEINLVRLNEKGYVEIDHALPFSRT | | | | |
| | | WDDSFNNKVLVLGSENQNKGNQTPYEYFNGKDNSREWQEF | | | | |
| | | KARVETSRFPRSKKQRILLQKFDEDGFKECNLNDTRYVNRFL | | | | |
| | | CQFVADHILLTGKGKRRVFASNGQITNLLRGFWGLRKVRAEN | | | | |
| | | DRHHALDAVVVACSTVAMQQKITRFVRYKEMNAFDGKTIDK | | | | |
| | | ETGKVLHQKTHFPQPWEFFAQEVMIRVFGKPDGKPEFEEADT | | | | |
| | | PEKLRTLLAEKLSSRPEAVHEYVTPLFVSRAPNRKMSGAHKD | | | | |
| | | TLRSAKRFVKHNEKISVKRVWLTEIKLADLENMVNYKNGREI | | | | |
| | | ELYEALKARLEAYGGNAKQAFDPKDNPFYKKGGQLVKAVR | | | | |
| | | VEKTQESGVLLNKKNAYTIADNGDMVRVDVFCKVDKKGKN | | | | |
| | | QYFIVPIYAWQVAENILPDIDCKGYRIDDSYTFCFSLHKYDLIA | | | | |
| | | FQKDEKSKVEFAYYINCDSSNGRFYLAWHDKGSKEQQFRIST | | | | |
| | | QNLVLIQKYQVNELGKEIRPCRLKKRPPVR | | | | |
| PpnCas9 | Pasteurella | MQNNPLNYILGLDLGIASIGWAVVEIDEESSPIRLIDVGVRTFE | 9,002 | N605A | H582A | D13A |
| | pneumotropica | RAEVAKTGESLALSRRLARSSRRLIKRRAERLKKAKRLLKAE | | | | |
| | | KILHSIDEKLPINVWQLRVKGLKEKLERQEWAAVLLHLSKHR | | | | |
| | | GYLSQRKNEGKSDNKELGALLSGIASNHQMLQSSEYRTPAEI | | | | |
| | | AVKKFQVEEGHIRNQRGSYTHTFSRLDLLAEMELLFQRQAEL | | | | |
| | | GNSYTSTTLLENLTALLMWQKPALAGDAILKMLGKCTFEPSE | | | | |
| | | YKAAKNSYSAERFVWLTKLNNLRILENGTERALNDNERFALL | | | | |
| | | EQPYEKSKLTYAQVRAMLALSDNAIFKGVRYLGEDKKTVES | | | | |
| | | KTTLIEMKFYHQIRKTLGSAELKKEWNELKGNSDLLDEIGTAF | | | | |
| | | SLYKTDDDICRYLEGKLPERVLNALLENLNFDKFIQLSLKALH | | | | |
| | | QILPLMLQGQRYDEAVSAIYGDHYGKKSTETTRLLPTIPADEI | | | | |
| | | RNPVVLRTLTQARKVINAVVRLYGSPARIHIETAREVGKSYQ | | | | |
| | | DRKKLEKQQEDNRKQRESAVKKFKEMFPHFVGEPKGKDILK | | | | |
| | | MRLYELQQAKCLYSGKSLELHRLLEKGYVEVDHALPFSRTW | | | | |
| | | DDSFNNKVLVLANENQNKGNLTPYEWLDGKNNSERWQHFV | | | | |
| | | VRVQTSGFSYAKKQRILNHKLDEKGFIERNLNDTRYVARFLC | | | | |
| | | NFIADNMLLVGKGKRNVFASNGQITALLRHRWGLQKVREQN | | | | |
| | | DRHHALDAVVVACSTVAMQQKITRFVRYNEGNVFSGERIDR | | | | |
| | | ETGEIIPLHFPSPWAFFKENVEIRIFSENPKLELENRLPDYPQYN | | | | |
| | | HEWVQPLFVSRMPTRKMTGQGHMETVKSAKRLNEGLSVLK | | | | |
| | | VPLTQLKLSDLERMVNRDREIALYESLKARLEQFGNDPAKAF | | | | |
| | | AEPFYKKGGALVKAVRLEQTQKSGVLVRDGNGVADNASMV | | | | |
| | | RVDVFTKGGKYFLVPIYTWQVAKGILPNRAATQGKDENDWD | | | | |
| | | IMDEMATFQFSLCQNDLIKLVTKKKTIFGYFNGLNRATSNINI | | | | |
| | | KEHDLDKSKGKLGIYLEVGVKLAISLEKYQVDELGKNIRPCR | | | | |
| | | PTKRQHVR | | | | |
| SauCas9 | Staphylococcus | MKRNYILGLDIGITSVGYGIIDYETRDVIDAGVRLFKEANVEN | 9,003 | N580A | H557A | D10A |
| SauCas9- | aureus | NEGRRSKRGARRLKRRRRHRIQRVKKLLFDYNLLTDHSELSG | | | | |
| | | INPYEARVKGLSQKLSEEEFSAALLHLAKRRGVHNVNEVEED | | | | |
| | | TGNELSTKEQISRNSKALEEKYVAELQLERLKKDGEVRGSINR | | | | |
| | | FKTSDYVKEAKQLLKVQKAYHQLDQSFIDTYIDLLETRRTYY | | | | |
| | | EGPGEGSPFGWKDIKEWYEMLMGHCTYFPEELRSVKYAYNA | | | | |
| | | DLYNALNDLNNLVITRDENEKLEYYEKFQIIENVFKQKKKPTL | | | | |
| | | KQIAKEILVNEEDIKGYRVTSTGKPEFTNLKVYHDIKDITARK | | | | |
| | | EIIENAELLDQIAKILTIYQSSEDIQEELTNLNSELTQEEIEQISN | | | | |
| | | LKGYTGTHNLSLKAINLILDELWHTNDNQIAIFNRLKLVPKKV | | | | |
| | | DLSQQKEIPTTLVDDFILSPVVKRSFIQSIKVINAIIKKYGLPNDI | | | | |
| | | IIELAREKNSKDAQKMINEMQKRNRQTNERIEEIIRTTGKENA | | | | |
| | | KYLIEKIKLHDMQEGKCLYSLEAIPLEDLLNNPFNYEVDHIIPR | | | | |
| | | SVSFDNSFNNKVLVKQEENSKKGNRTPFQYLSSSDSKISYETF | | | | |
| | | KKHILNLAKGKGRISKTKKEYLLEERDINRFSVQKDFINRNLV | | | | |
| | | DTRYATRGLMNLLRSYFRVNNLDVKVKSINGGFTSFLRRKW | | | | |
| | | KFKKERNKGYKHHAEDALIIANADFIFKEWKKLDKAKKVME | | | | |
| | | NQMFEEKQAESMPEIETEQEYKEIFITPHQIKHIKDFKDYKYSH | | | | |
| | | RVDKKPNRELINDTLYSTRKDDKGNTLIVNNLNGLYDKDND | | | | |
| | | KLKKLINKSPEKLLMYHHDPQTYQKLKLIMEQYGDEKNPLY | | | | |
| | | KYYEETGNYLTKYSKKDNGPVIKKIKYYGNKLNAHLDITDD | | | | |
| | | YPNSRNKVVKLSLKPYRFDVYLDNGVYKFVTVKNLDVIKKE | | | | |
| | | NYYEVNSKCYEEAKKLKKISNQAEFIASFYNNDLIKINGELYR | | | | |
| | | VIGVNNDLLNRIEVNMIDITYREYLENMNDKRPPRIIKTIASKT | | | | |
| | | QSIKKYSTDILGNLYEVKSKKHPQIIKKG | | | | |
| KKH | Staphylococcus | MKRNYILGLDIGITSVGYGIIDYETRDVIDAGVRLFKEANVEN | 9,004 | N580A | H557A | D10A |
| | aureus | NEGRRSKRGARRLKRRRRHRIQRVKKLLFDYNLLTDHSELSG | | | | |
| | | INPYEARVKGLSQKLSEEEFSAALLHLAKRRGVHNVNEVEED | | | | |
| | | TGNELSTKEQISRNSKALEEKYVAELQLERLKKDGEVRGSINR | | | | |
| | | FKTSDYVKEAKQLLKVQKAYHQLDQSFIDTYIDLLETRRTYY | | | | |
| | | EGPGEGSPFGWKDIKEWYEMLMGHCTYFPEELRSVKYAYNA | | | | |
| | | DLYNALNDLNNLVITRDENEKLEYYEKFQIIENVFKQKKKPTL | | | | |
| | | KQIAKEILVNEEDIKGYRVTSTGKPEFTNLKVYHDIKDITARK | | | | |
| | | EIIENAELLDQIAKILTIYQSSEDIQEELTNLNSELTQEEIEQISN | | | | |
| | | LKGYTGTHNLSLKAINLILDELWHTNDNQIAIFNRLKLVPKKV | | | | |
| | | DLSQQKEIPTTLVDDFILSPVVKRSFIQSIKVINAIIKKYGLPNDI | | | | |
| | | IIELAREKNSKDAQKMINEMQKRNRQTNERIEEIIRTTGKENA | | | | |
| | | KYLIEKIKLHDMQEGKCLYSLEAIPLEDLLNNPFNYEVDHIIPR | | | | |
| | | SVSFDNSFNNKVLVKQEENSKKGNRTPFQYLSSSDSKISYETF | | | | |
| | | KKHILNLAKGKGRISKTKKEYLLEERDINRFSVQKDFINRNLV | | | | |
| | | DTRYATRGLMNLLRSYFRVNNLDVKVKSINGGFTSFLRRKW | | | | |
| | | KFKKERNKGYKHHAEDALIIANADFIFKEWKKLDKAKKVME | | | | |
| | | NQMFEEKQAESMPEIETEQEYKEIFITPHQIKHIKDFKDYKYSH | | | | |
| | | RVDKKPNRKLINDTLYSTRKDDKGNTLIVNNLNGLYDKDND | | | | |
| | | KLKKLINKSPEKLLMYHHDPQTYQKLKLIMEQYGDEKNPLY | | | | |
| | | KYYEETGNYLTKYSKKDNGPVIKKIKYYGNKLNAHLDITDD | | | | |
| | | YPNSRNKVVKLSLKPYRFDVYLDNGVYKFVTVKNLDVIKKE | | | | |
| | | NYYEVNSKCYEEAKKLKKISNQAEFIASFYKNDLIKINGELYR | | | | |
| | | VIGVNNDLLNRIEVNMIDITYREYLENMNDKRPPHIIKTIASKT | | | | |
| | | QSIKKYSTDILGNLYEVKSKKHPQIIKKG | | | | |
| SauriCas9 | Staphylococcus | MQENQQKQNYILGLDIGITSVGYGLIDSKTREVIDAGVRLFPE | 9,005 | N588A | H565A | D15A |
| | auricularis | ADSENNSNRRSKRGARRLKRRRIHRLNRVKDLLADYQMIDL | | | | |
| | | NNVPKSTDPYTIRVKGLREPLTKEEFAIALLHIAKRRGLHNISV | | | | |
| | | SMGDEEQDNELSTKQQLQKNAQQLQDKYVCELQLERLTNIN | | | | |
| | | KVRGEKNRFKTEDFVKEVKQLCETQRQYHNIDDQFIQQYIDL | | | | |
| | | VSTRREYFEGPGNGSPYGWDGDLLKWYEKLMGRCTYFPEEL | | | | |
| | | RSVKYAYSADLFNALNDLNNLVVTRDDNPKLEYYEKYHIIEN | | | | |
| | | VFKQKKNPTLKQIAKEIGVQDYDIRGYRITKSGKPQFTSFKLY | | | | |
| | | HDLKNIFEQAKYLEDVEMLDEIAKILTIYQDEISIKKALDQLPE | | | | |
| | | LLTESEKSQIAQLTGYTGTHRLSLKCIHIVIDELWESPENQMEI | | | | |
| | | FTRLNLKPKKVEMSEIDSIPTTLVDEFILSPVVKRAFIQSIKVIN | | | | |
| | | AVINRFGLPEDIIIELAREKNSKDRRKFINKLQKQNEATRKKIE | | | | |
| | | QLLAKYGNTNAKYMIEKIKLHDMQEGKCLYSLEAIPLEDLLS | | | | |
| | | NPTHYEVDHIIPRSVSFDNSLNNKVLVKQSENSKKGNRTPYQ | | | | |
| | | YLSSNESKISYNQFKQHILNLSKAKDRISKKKRDMLLEERDIN | | | | |
| | | KFEVQKEFINRNLVDTRYATRELSNLLKTYFSTHDYAVKVKT | | | | |
| | | INGGFTNHLRKVWDFKKHRNHGYKHHAEDALVIANADFLFK | | | | |
| | | THKALRRTDKILEQPGLEVNDTTVKVDTEEKYQELFETPKQV | | | | |
| | | KNIKQFRDFKYSHRVDKKPNRQLINDTLYSTREIDGETYVVQ | | | | |
| | | TLKDLYAKDNEKVKKLFTERPQKILMYQHDPKTFEKLMTILN | | | | |
| | | QYAEAKNPLAAYYEDKGEYVTKYAKKGNGPAIHKIKYIDKK | | | | |
| | | LGSYLDVSNKYPETQNKLVKLSLKSFRFDIYKCEQGYKMVSI | | | | |
| | | GYLDVLKKDNYYYIPKDKYEAEKQKKKIKESDLFVGSFYYN | | | | |
| | | DLIMYEDELFRVIGVNSDINNLVELNMVDITYKDFCEVNNVT | | | | |
| | | GEKRIKKTIGKRVVLIEKYTTDILGNLYKTPLPKKPQLIFKRGE | | | | |
| | | L | | | | |
| SauriCas9- | Staphylococcus | MQENQQKQNYILGLDIGITSVGYGLIDSKTREVIDAGVRLFPE | 9,006 | N588A | H565A | D15A |
| KKH | auricularis | ADSENNSNRRSKRGARRLKRRRIHRLNRVKDLLADYQMIDL | | | | |
| | | NNVPKSTDPYTIRVKGLREPLTKEEFAIALLHIAKRRGLHNISV | | | | |
| | | SMGDEEQDNELSTKQQLQKNAQQLQDKYVCELQLERLTNIN | | | | |
| | | KVRGEKNRFKTEDFVKEVKQLCETQRQYHNIDDQFIQQYIDL | | | | |
| | | VSTRREYFEGPGNGSPYGWDGDLLKWYEKLMGRCTYFPEEL | | | | |
| | | RSVKYAYSADLFNALNDLNNLVVTRDDNPKLEYYEKYHIIEN | | | | |
| | | VFKQKKNPTLKQIAKEIGVQDYDIRGYRITKSGKPQFTSFKLY | | | | |
| | | HDLKNIFEQAKYLEDVEMLDEIAKILTIYQDEISIKKALDQLPE | | | | |
| | | LLTESEKSQIAQLTGYTGTHRLSLKCIHIVIDELWESPENQMEI | | | | |
| | | FTRLNLKPKKVEMSEIDSIPTTLVDEFILSPVVKRAFIQSIKVIN | | | | |
| | | AVINRFGLPEDIIIELAREKNSKDRRKFINKLQKQNEATRKKIE | | | | |
| | | QLLAKYGNTNAKYMIEKIKLHDMQEGKCLYSLEAIPLEDLLS | | | | |
| | | NPTHYEVDHIIPRSVSFDNSLNNKVLVKQSENSKKGNRTPYQ | | | | |
| | | YLSSNESKISYNQFKQHILNLSKAKDRISKKKRDMLLEERDIN | | | | |
| | | KFEVQKEFINRNLVDTRYATRELSNLLKTYFSTHDYAVKVKT | | | | |
| | | INGGFTNHLRKVWDFKKHRNHGYKHHAEDALVIANADFLFK | | | | |
| | | THKALRRTDKILEQPGLEVNDTTVKVDTEEKYQELFETPKQV | | | | |
| | | KNIKQFRDFKYSHRVDKKPNRKLINDTLYSTREIDGETYVVQ | | | | |
| | | TLKDLYAKDNEKVKKLFTERPQKILMYQHDPKTFEKLMTILN | | | | |
| | | QYAEAKNPLAAYYEDKGEYVTKYAKKGNGPAIHKIKYIDKK | | | | |
| | | LGSYLDVSNKYPETQNKLVKLSLKSFRFDIYKCEQGYKMVSI | | | | |
| | | GYLDVLKKDNYYYIPKDKYEAEKQKKKIKESDLFVGSFYKN | | | | |
| | | DLIMYEDELFRVIGVNSDINNLVELNMVDITYKDFCEVNNVT | | | | |
| | | GEKHIKKTIGKRVVLIEKYTTDILGNLYKTPLPKKPQLIFKRGE | | | | |
| | | L | | | | |
| ScaCas9- | Streptococcus | MEKKYSIGLDIGTNSVGWAVITDDYKVPSKKFKVLGNTNRKS | 9,007 | N872A | H849A | D10A |
| Sc++ | canis | IKKNLMGALLFDSGETAEATRLKRTARRRYTRRKNRIRYLQEI | | | | |
| | | FANEMAKLDDSFFQRLEESFLVEEDKKNERHPIFGNLADEVA | | | | |
| | | YHRNYPTIYHLRKKLADSPEKADLRLIYLALAHIIKFRGHFLIE | | | | |
| | | GKLNAENSDVAKLFYQLIQTYNQLFEESPLDEIEVDAKGILSA | | | | |
| | | RLSKSKRLEKLIAVFPNEKKNGLFGNIIALALGLTPNFKSNFDL | | | | |
| | | TEDAKLQLSKDTYDDDLDELLGQIGDQYADLFSAAKNLSDAI | | | | |
| | | LLSDILRSNSEVTKAPLSASMVKRYDEHHQDLALLKTLVRQQ | | | | |
| | | FPEKYAEIFKDDTKNGYAGYVGADKKLRKRSGKLATEEEFY | | | | |
| | | KFIKPILEKMDGAEELLAKLNRDDLLRKQRTFDNGSIPHQIHL | | | | |
| | | KELHAILRRQEEFYPFLKENREKIEKILTFRIPYYVGPLARGNS | | | | |
| | | RFAWLTRKSEEAITPWNFEEVVDKGASAQSFIERMTNFDEQL | | | | |
| | | PNKKVLPKHSLLYEYFTVYNELTKVKYVTERMRKPEFLSGEQ | | | | |
| | | KKAIVDLLFKTNRKVTVKQLKEDYFKKIECFDSVEIIGVEDRF | | | | |
| | | NASLGTYHDLLKIIKDKDFLDNEENEDILEDIVLTLTLFEDRE | | | | |
| | | MIEERLKTYAHLFDDKVMKQLKRRHYTGWGRLSRKMINGIR | | | | |
| | | DKQSGKTILDFLKSDGFSNRNFMQLIHDDSLTFKEEIEKAQVS | | | | |
| | | GQGDSLHEQIADLAGSPAIKKGILQTVKIVDELVKVMGHKPE | | | | |
| | | NIVIEMARENQTTTKGLQQSRERKKRIEEGIKELESQILKENPV | | | | |
| | | ENTQLQNEKLYLYYLQNGRDMYVDQELDINRLSDYDVDHIV | | | | |
| | | PQSFIKDDSIDNKVLTRSVENRGKSDNVPSEEVVKKMKNYWR | | | | |
| | | QLLNAKLITQRKFDNLTKAERGGLSEADKAGFIKRQLVETRQI | | | | |
| | | TKHVARILDSRMNTKRDKNDKPIREVKVITLKSKLVSDFRKD | | | | |
| | | FQLYKVRDINNYHHAHDAYLNAVVGTALIKKYPKLESEFVY | | | | |
| | | GDYKVYDVRKMIAKSEQEIGKATAKRFFYSNIMNFFKTEVKL | | | | |
| | | ANGEIRKRPLIETNGETGEVVWNKEKDFATVRKVLAMPQVNI | | | | |
| | | VKKTEVQTGGFSKESILSKRESAKLIPRKKGWDTRKYGGFGS | | | | |
| | | PTVAYSILVVAKVEKGKAKKLKSVKVLVGITIMEKGSYEKDP | | | | |
| | | IGFLEAKGYKDIKKELIFKLPKYSLFELENGRRRMLASAKELQ | | | | |
| | | KANELVLPQHLVRLLYYTQNISATTGSNNLGYIEQHREEFKEI | | | | |
| | | FEKIIDFSEKYILKNKVNSNLKSSFDEQFAVSDSILLSNSFVSLL | | | | |
| | | KYTSFGASGGFTFLDLDVKQGRLRYQTVTEVLDATLIYQSITG | | | | |
| | | LYETRTDLSQLGGD | | | | |
| SpyCas9 | Streptococcus | MDKKYSIGLDIGTNSVGWAVITDEYKVPSKKFKVLGNTDRHS | 9,008 | N863A | H840A | D10A |
| | pyogenes | IKKNLIGALLFDSGETAEATRLKRTARRRYTRRKNRICYLQEIF | | | | |
| | | SNEMAKVDDSFFHRLEESFLVEEDKKHERHPIFGNIVDEVAY | | | | |
| | | HEKYPTIYHLRKKLVDSTDKADLRLIYLALAHMIKFRGHFLIE | | | | |
| | | GDLNPDNSDVDKLFIQLVQTYNQLFEENPINASGVDAKAILSA | | | | |
| | | RLSKSRRLENLIAQLPGEKKNGLFGNLIALSLGLTPNFKSNFDL | | | | |
| | | AEDAKLQLSKDTYDDDLDNLLAQIGDQYADLFLAAKNLSDA | | | | |
| | | ILLSDILRVNTEITKAPLSASMIKRYDEHHQDLTLLKALVRQQ | | | | |
| | | LPEKYKEIFFDQSKNGYAGYIDGGASQEEFYKFIKPILEKMDG | | | | |
| | | TEELLVKLNREDLLRKQRTFDNGSIPHQIHLGELHAILRRQED | | | | |
| | | FYPFLKDNREKIEKILTFRIPYYVGPLARGNSRFAWMTRKSEE | | | | |
| | | TITPWNFEEVVDKGASAQSFIERMTNFDKNLPNEKVLPKHSLL | | | | |
| | | YEYFTVYNELTKVKYVTEGMRKPAFLSGEQKKAIVDLLFKTN | | | | |
| | | RKVTVKQLKEDYFKKIECFDSVEISGVEDRFNASLGTYHDLL | | | | |
| | | KIIKDKDFLDNEENEDILEDIVLTLTLFEDREMIEERLKTYAHL | | | | |
| | | FDDKVMKQLKRRRYTGWGRLSRKLINGIRDKQSGKTILDFLK | | | | |
| | | SDGFANRNFMQLIHDDSLTFKEDIQKAQVSGQGDSLHEHIAN | | | | |
| | | LAGSPAIKKGILQTVKVVDELVKVMGRHKPENIVIEMARENQ | | | | |
| | | TTQKGQKNSRERMKRIEEGIKELGSQILKEHPVENTQLQNEKL | | | | |
| | | YLYYLQNGRDMYVDQELDINRLSDYDVDHIVPQSFLKDDSID | | | | |
| | | NKVLTRSDKNRGKSDNVPSEEVVKKMKNYWRQLLNAKLITQ | | | | |
| | | RKFDNLTKAERGGLSELDKAGFIKRQLVETRQITKHVAQILDS | | | | |
| | | RMNTKYDENDKLIREVKVITLKSKLVSDFRKDFQFYKVREIN | | | | |
| | | NYHHAHDAYLNAVVGTALIKKYPKLESEFVYGDYKVYDVR | | | | |
| | | KMIAKSEQEIGKATAKYFFYSNIMNFFKTEITLANGEIRKRPLI | | | | |
| | | ETNGETGEIVWDKGRDFATVRKVLSMPQVNIVKKTEVQTGG | | | | |
| | | FSKESILPKRNSDKLIARKKDWDPKKYGGFDSPTVAYSVLVV | | | | |
| | | AKVEKGKSKKLKSVKELLGITIMERSSFEKNPIDFLEAKGYKE | | | | |
| | | VKKDLIIKLPKYSLFELENGRKRMLASAGELQKGNELALPSK | | | | |
| | | YVNFLYLASHYEKLKGSPEDNEQKQLFVEQHKHYLDEIIEQIS | | | | |
| | | EFSKRVILADANLDKVLSAYNKHRDKPIREQAENIIHLFTLTN | | | | |
| | | LGAPAAFKYFDTTIDRKRYTSTKEVLDATLIHQSITGLYETRID | | | | |
| | | LSQLGGD | | | | |
| SpyCas9- | Streptococcus | MDKKYSIGLDIGTNSVGWAVITDEYKVPSKKFKVLGNTDRHS | 9,009 | N863A | H840A | D10A |
| NG | pyogenes | IKKNLIGALLFDSGETAEATRLKRTARRRYTRRKNRICYLQEIF | | | | |
| | | SNEMAKVDDSFFHRLEESFLVEEDKKHERHPIFGNIVDEVAY | | | | |
| | | HEKYPTIYHLRKKLVDSTDKADLRLIYLALAHMIKFRGHFLIE | | | | |
| | | GDLNPDNSDVDKLFIQLVQTYNQLFEENPINASGVDAKAILSA | | | | |
| | | RLSKSRRLENLIAQLPGEKKNGLFGNLIALSLGLTPNFKSNFDL | | | | |
| | | AEDAKLQLSKDTYDDDLDNLLAQIGDQYADLFLAAKNLSDA | | | | |
| | | ILLSDILRVNTEITKAPLSASMIKRYDEHHQDLTLLKALVRQQ | | | | |
| | | LPEKYKEIFFDQSKNGYAGYIDGGASQEEFYKFIKPILEKMDG | | | | |
| | | TEELLVKLNREDLLRKQRTFDNGSIPHQIHLGELHAILRRQED | | | | |
| | | FYPFLKDNREKIEKILTFRIPYYVGPLARGNSRFAWMTRKSEE | | | | |
| | | TITPWNFEEVVDKGASAQSFIERMTNFDKNLPNEKVLPKHSLL | | | | |
| | | YEYFTVYNELTKVKYVTEGMRKPAFLSGEQKKAIVDLLFKTN | | | | |
| | | RKVTVKQLKEDYFKKIECFDSVEISGVEDRFNASLGTYHDLL | | | | |
| | | KIIKDKDFLDNEENEDILEDIVLTLTLFEDREMIEERLKTYAHL | | | | |
| | | FDDKVMKQLKRRRYTGWGRLSRKLINGIRDKQSGKTILDFLK | | | | |
| | | SDGFANRNFMQLIHDDSLTFKEDIQKAQVSGQGDSLHEHIAN | | | | |
| | | LAGSPAIKKGILQTVKVVDELVKVMGRHKPENIVIEMARENQ | | | | |
| | | TTQKGQKNSRERMKRIEEGIKELGSQILKEHPVENTQLQNEKL | | | | |
| | | YLYYLQNGRDMYVDQELDINRLSDYDVDHIVPQSFLKDDSID | | | | |
| | | NKVLTRSDKNRGKSDNVPSEEVVKKMKNYWRQLLNAKLITQ | | | | |
| | | RKFDNLTKAERGGLSELDKAGFIKRQLVETRQITKHVAQILDS | | | | |
| | | RMNTKYDENDKLIREVKVITLKSKLVSDFRKDFQFYKVREIN | | | | |
| | | NYHHAHDAYLNAVVGTALIKKYPKLESEFVYGDYKVYDVR | | | | |
| | | KMIAKSEQEIGKATAKYFFYSNIMNFFKTEITLANGEIRKRPLI | | | | |
| | | ETNGETGEIVWDKGRDFATVRKVLSMPQVNIVKKTEVQTGG | | | | |
| | | FSKESIRPKRNSDKLIARKKDWDPKKYGGFVSPTVAYSVLVV | | | | |
| | | AKVEKGKSKKLKSVKELLGITIMERSSFEKNPIDFLEAKGYKE | | | | |
| | | VKKDLIIKLPKYSLFELENGRKRMLASARFLQKGNELALPSKY | | | | |
| | | VNFLYLASHYEKLKGSPEDNEQKQLFVEQHKHYLDEIIEQISE | | | | |
| | | FSKRVILADANLDKVLSAYNKHRDKPIREQAENIIHLFTLTNL | | | | |
| | | GAPRAFKYFDTTIDRKVYRSTKEVLDATLIHQSITGLYETRIDL | | | | |
| | | SQLGGD | | | | |
| Spy Cas9- | Streptococcus | MDKKYSIGLDIGTNSVGWAVITDEYKVPSKKFKVLGNTDRHS | 9,010 | N863A | H840A | D10A |
| SpRY | pyogenes | IKKNLIGALLFDSGETAERTRLKRTARRRYTRRKNRICYLQEIF | | | | |
| | | SNEMAKVDDSFFHRLEESFLVEEDKKHERHPIFGNIVDEVAY | | | | |
| | | HEKYPTIYHLRKKLVDSTDKADLRLIYLALAHMIKFRGHFLIE | | | | |
| | | GDLNPDNSDVDKLFIQLVQTYNQLFEENPINASGVDAKAILSA | | | | |
| | | RLSKSRRLENLIAQLPGEKKNGLFGNLIALSLGLTPNFKSNFDL | | | | |
| | | AEDAKLQLSKDTYDDDLDNLLAQIGDQYADLFLAAKNLSDA | | | | |
| | | ILLSDILRVNTEITKAPLSASMIKRYDEHHQDLTLLKALVRQQ | | | | |
| | | LPEKYKEIFFDQSKNGYAGYIDGGASQEEFYKFIKPILEKMDG | | | | |
| | | TEELLVKLNREDLLRKQRTFDNGSIPHQIHLGELHAILRRQED | | | | |
| | | FYPFLKDNREKIEKILTFRIPYYVGPLARGNSRFAWMTRKSEE | | | | |
| | | TITPWNFEEVVDKGASAQSFIERMTNFDKNLPNEKVLPKHSLL | | | | |
| | | YEYFTVYNELTKVKYVTEGMRKPAFLSGEQKKAIVDLLFKTN | | | | |
| | | RKVTVKQLKEDYFKKIECFDSVEISGVEDRFNASLGTYHDLL | | | | |
| | | KIIKDKDFLDNEENEDILEDIVLTLTLFEDREMIEERLKTYAHL | | | | |
| | | FDDKVMKQLKRRRYTGWGRLSRKLINGIRDKQSGKTILDFLK | | | | |
| | | SDGFANRNFMQLIHDDSLTFKEDIQKAQVSGQGDSLHEHIAN | | | | |
| | | LAGSPAIKKGILQTVKVVDELVKVMGRHKPENIVIEMARENQ | | | | |
| | | TTQKGQKNSRERMKRIEEGIKELGSQILKEHPVENTQLQNEKL | | | | |
| | | YLYYLQNGRDMYVDQELDINRLSDYDVDHIVPQSFLKDDSID | | | | |
| | | NKVLTRSDKNRGKSDNVPSEEVVKKMKNYWRQLLNAKLITQ | | | | |
| | | RKFDNLTKAERGGLSELDKAGFIKRQLVETRQITKHVAQILDS | | | | |
| | | RMNTKYDENDKLIREVKVITLKSKLVSDFRKDFQFYKVREIN | | | | |
| | | NYHHAHDAYLNAVVGTALIKKYPKLESEFVYGDYKVYDVR | | | | |
| | | KMIAKSEQEIGKATAKYFFYSNIMNFFKTEITLANGEIRKRPLI | | | | |
| | | ETNGETGEIVWDKGRDFATVRKVLSMPQVNIVKKTEVQTGG | | | | |
| | | FSKESIRPKRNSDKLIARKKDWDPKKYGGFLWPTVAYSVLVV | | | | |
| | | AKVEKGKSKKLKSVKELLGITIMERSSFEKNPIDFLEAKGYKE | | | | |
| | | VKKDLIIKLPKYSLFELENGRKRMLASAKQLQKGNELALPSK | | | | |
| | | YVNFLYLASHYEKLKGSPEDNEQKQLFVEQHKHYLDEIIEQIS | | | | |
| | | EFSKRVILADANLDKVLSAYNKHRDKPIREQAENIIHLFTLTR | | | | |
| | | LGAPRAFKYFDTTIDPKQYRSTKEVLDATLIHQSITGLYETRID | | | | |
| | | LSQLGGD | | | | |
| St1Cas9 | Streptococcus | MSDLVLGLDIGIGSVGVGILNKVTGEIIHKNSRIFPAAQAENNL | 9,011 | N622A | H599A | D9A |
| | thermophilus | VRRTNRQGRRLARRKKHRRVRLNRLFEESGLITDFTKISINLN | | | | |
| | | PYQLRVKGLTDELSNEELFIALKNMVKHRGISYLDDASDDGN | | | | |
| | | SSVGDYAQIVKENSKQLETKTPGQIQLERYQTYGQLRGDFTV | | | | |
| | | EKDGKKHRLINVFPTSAYRSEALRILQTQQEFNPQITDEFINRY | | | | |
| | | LEILTGKRKYYHGPGNEKSRTDYGRYRTSGETLDNIFGILIGK | | | | |
| | | CTFYPDEFRAAKASYTAQEFNLLNDLNNLTVPTETKKLSKEQ | | | | |
| | | KNQIINYVKNEKAMGPAKLFKYIAKLLSCDVADIKGYRIDKS | | | | |
| | | GKAEIHTFEAYRKMKTLETLDIEQMDRETLDKLAYVLTLNTE | | | | |
| | | REGIQEALEHEFADGSFSQKQVDELVQFRKANSSIFGKGWHN | | | | |
| | | FSVKLMMELIPELYETSEEQMTILTRLGKQKTTSSSNKTKYID | | | | |
| | | EKLLTEEIYNPVVAKSVRQAIKIVNAAIKEYGDFDNIVIEMAR | | | | |
| | | ETNEDDEKKAIQKIQKANKDEKDAAMLKAANQYNGKAELP | | | | |
| | | HSVFHGHKQLATKIRLWHQQGERCLYTGKTISIHDLINNSNQF | | | | |
| | | EVDHILPLSITFDDSLANKVLVYATANQEKGQRTPYQALDSM | | | | |
| | | DDAWSFRELKAFVRESKTLSNKKKEYLLTEEDISKFDVRKKFI | | | | |
| | | ERNLVDTRYASRVVLNALQEHFRAHKIDTKVSVVRGQFTSQL | | | | |
| | | RRHWGIEKTRDTYHHHAVDALIIAASSQLNLWKKQKNTLVS | | | | |
| | | YSEDQLLDIETGELISDDEYKESVFKAPYQHFVDTLKSKEFED | | | | |
| | | SILFSYQVDSKFNRKISDATIYATRQAKVGKDKADETYVLGKI | | | | |
| | | KDIYTQDGYDAFMKIYKKDKSKFLMYRHDPQTFEKVIEPILE | | | | |
| | | NYPNKQINEKGKEVPCNPFLKYKEEHGYIRKYSKKGNGPEIK | | | | |
| | | SLKYYDSKLGNHIDITPKDSNNKVVLQSVSPWRADVYFNKTT | | | | |
| | | GKYEILGLKYADLQFEKGTGTYKISQEKYNDIKKKEGVDSDS | | | | |
| | | EFKFTLYKNDLLLVKDTETKEQQLFRFLSRTMPKQKHYVELK | | | | |
| | | PYDKQKFEGGEALIKVLGNVANSGQCKKGLGKSNISIYKVRT | | | | |
| | | DVLGNQHIIKNEGDKPKLDF | | | | |
| BlatCas9 | Brevibacillus | MAYTMGIDVGIASCGWAIVDLERQRIIDIGVRTFEKAENPKNG | 9,012 | N607A | H584A | D8A |
| | laterosporus | EALAVPRREARSSRRRLRRKKHRIERLKHMFVRNGLAVDIQH | | | | |
| | | LEQTLRSQNEIDVWQLRVDGLDRMLTQKEWLRVLIHLAQRR | | | | |
| | | GFQSNRKTDGSSEDGQVLVNVTENDRLMEEKDYRTVAEMM | | | | |
| | | VKDEKFSDHKRNKNGNYHGVVSRSSLLVEIHTLFETQRQHHN | | | | |
| | | SLASKDFELEYVNIWSAQRPVATKDQIEKMIGTCTFLPKEKRA | | | | |
| | | PKASWHFQYFMLLQTINHIRITNVQGTRSLNKEEIEQVVNMA | | | | |
| | | LTKSKVSYHDTRKILDLSEEYQFVGLDYGKEDEKKKVESKET | | | | |
| | | IIKLDDYHKLNKIFNEVELAKGETWEADDYDTVAYALTFFKD | | | | |
| | | DEDIRDYLQNKYKDSKNRLVKNLANKEYTNELIGKVSTLSFR | | | | |
| | | KVGHLSLKALRKIIPFLEQGMTYDKACQAAGFDFQGISKKKR | | | | |
| | | SVVLPVIDQISNPVVNRALTQTRKVINALIKKYGSPETIHIETA | | | | |
| | | RELSKTFDERKNITKDYKENRDKNEHAKKHLSELGIINPTGLD | | | | |
| | | IVKYKLWCEQQGRCMYSNQPISFERLKESGYTEVDHIIPYSRS | | | | |
| | | MNDSYNNRVLVMTRENREKGNQTPFEYMGNDTQRWYEFEQ | | | | |
| | | RVTTNPQIKKEKRQNLLLKGFTNRRELEMLERNLNDTRYITK | | | | |
| | | YLSHFISTNLEFSPSDKKKKVVNTSGRITSHLRSRWGLEKNRG | | | | |
| | | QNDLHHAMDAIVIAVTSDSFIQQVTNYYKRKERRELNGDDKF | | | | |
| | | PLPWKFFREEVIARLSPNPKEQIEALPNHFYSEDELADLQPIFV | | | | |
| | | SRMPKRSITGEAHQAQFRRVVGKTKEGKNITAKKTALVDISY | | | | |
| | | DKNGDFNMYGRETDPATYEAIKERYLEFGGNVKKAFSTDLH | | | | |
| | | KPKKDGTKGPLIKSVRIMENKTLVHPVNKGKGVVYNSSIVRT | | | | |
| | | DVFQRKEKYYLLPVYVTDVTKGKLPNKVIVAKKGYHDWIEV | | | | |
| | | DDSFTFLFSLYPNDLIFIRQNPKKKISLKKRIESHSISDSKEVQEI | | | | |
| | | HAYYKGVDSSTAAIEFIIHDGSYYAKGVGVQNLDCFEKYQVD | | | | |
| | | ILGNYFKVKGEKRLELETSDSNHKGKDVNSIKSTSR | | | | |
| cCas9-v16 | Staphylococcus | MKRNYILGLDIGITSVGYGIIDYETRDVIDAGVRLFKEANVEN | 9,013 | N580A | H557A | D10A |
| | aureus | NEGRRSKRGARRLKRRRRHRIQRVKKLLFDYNLLTDHSELSG | | | | |
| | | INPYEARVKGLSQKLSEEEFSAALLHLAKRRGVHNVNEVEED | | | | |
| | | TGNELSTKEQISRNSKALEEKYVAELQLERLKKDGEVRGSINR | | | | |
| | | FKTSDYVKEAKQLLKVQKAYHQLDQSFIDTYIDLLETRRTYY | | | | |
| | | EGPGEGSPFGWKDIKEWYEMLMGHCTYFPEELRSVKYAYNA | | | | |
| | | DLYNALNDLNNLVITRDENEKLEYYEKFQIIENVFKQKKKPTL | | | | |
| | | KQIAKEILVNEEDIKGYRVTSTGKPEFTNLKVYHDIKDITARK | | | | |
| | | EIIENAELLDQIAKILTIYQSSEDIQEELTNLNSELTQEEIEQISN | | | | |
| | | LKGYTGTHNLSLKAINLILDELWHTNDNQIAIFNRLKLVPKKV | | | | |
| | | DLSQQKEIPTTLVDDFILSPVVKRSFIQSIKVINAIIKKYGLPNDI | | | | |
| | | IIELAREKNSKDAQKMINEMQKRNRQTNERIEEIIRTTGKENA | | | | |
| | | KYLIEKIKLHDMQEGKCLYSLEAIPLEDLLNNPFNYEVDHIIPR | | | | |
| | | SVSFDNSFNNKVLVKQEENSKKGNRTPFQYLSSSDSKISYETF | | | | |
| | | KKHILNLAKGKGRISKTKKEYLLEERDINRFSVQKDFINRNLV | | | | |
| | | DTRYATRGLMNLLRSYFRVNNLDVKVKSINGGFTSFLRRKW | | | | |
| | | KFKKERNKGYKHHAEDALIIANADFIFKEWKKLDKAKKVME | | | | |
| | | NQMFEEKQAESMPEIETEQEYKEIFITPHQIKHIKDFKDYKYSH | | | | |
| | | RVDKKPNRKLINDTLYSTRKDDKGNTLIVNNLNGLYDKDND | | | | |
| | | KLKKLINKSPEKLLMYHHDPQTYQKLKLIMEQYGDEKNPLY | | | | |
| | | KYYEETGNYLTKYSKKDNGPVIKKIKYYGNKLNAHLDITDD | | | | |
| | | YPNSRNKVVKLSLKPYRFDVYLDNGVYKFVTVKNLDVIKKE | | | | |
| | | NYYEVNSKCYEEAKKLKKISNQAEFIASFYKNDLIKINGELYR | | | | |
| | | VIGVNSDKNNLIEVNMIDITYREYLENMNDKRPPHIIKTIASKT | | | | |
| | | QSIKKYSTDILGNLYEVKSKKHPQIIKKG | | | | |
| cCas9-v17 | Staphylococcus | MKRNYILGLDIGITSVGYGIIDYETRDVIDAGVRLFKEANVEN | 9,014 | N580A | H557A | D10A |
| | aureus | NEGRRSKRGARRLKRRRRHRIQRVKKLLFDYNLLTDHSELSG | | | | |
| | | INPYEARVKGLSQKLSEEEFSAALLHLAKRRGVHNVNEVEED | | | | |
| | | TGNELSTKEQISRNSKALEEKYVAELQLERLKKDGEVRGSINR | | | | |
| | | FKTSDYVKEAKQLLKVQKAYHQLDQSFIDTYIDLLETRRTYY | | | | |
| | | EGPGEGSPFGWKDIKEWYEMLMGHCTYFPEELRSVKYAYNA | | | | |
| | | DLYNALNDLNNLVITRDENEKLEYYEKFQIIENVFKQKKKPTL | | | | |
| | | KQIAKEILVNEEDIKGYRVTSTGKPEFTNLKVYHDIKDITARK | | | | |
| | | EIIENAELLDQIAKILTIYQSSEDIQEELTNLNSELTQEEIEQISN | | | | |
| | | LKGYTGTHNLSLKAINLILDELWHTNDNQIAIFNRLKLVPKKV | | | | |
| | | DLSQQKEIPTTLVDDFILSPVVKRSFIQSIKVINAIIKKYGLPNDI | | | | |
| | | IIELAREKNSKDAQKMINEMQKRNRQTNERIEEIIRTTGKENA | | | | |
| | | KYLIEKIKLHDMQEGKCLYSLEAIPLEDLLNNPFNYEVDHIIPR | | | | |
| | | SVSFDNSFNNKVLVKQEENSKKGNRTPFQYLSSSDSKISYETF | | | | |
| | | KKHILNLAKGKGRISKTKKEYLLEERDINRFSVQKDFINRNLV | | | | |
| | | DTRYATRGLMNLLRSYFRVNNLDVKVKSINGGFTSFLRRKW | | | | |
| | | KFKKERNKGYKHHAEDALIIANADFIFKEWKKLDKAKKVME | | | | |
| | | NQMFEEKQAESMPEIETEQEYKEIFITPHQIKHIKDFKDYKYSH | | | | |
| | | RVDKKPNRKLINDTLYSTRKDDKGNTLIVNNLNGLYDKDND | | | | |
| | | KLKKLINKSPEKLLMYHHDPQTYQKLKLIMEQYGDEKNPLY | | | | |
| | | KYYEETGNYLTKYSKKDNGPVIKKIKYYGNKLNAHLDITDD | | | | |
| | | YPNSRNKVVKLSLKPYRFDVYLDNGVYKFVTVKNLDVIKKE | | | | |
| | | NYYEVNSKCYEEAKKLKKISNQAEFIASFYKNDLIKINGELYR | | | | |
| | | VIGVNNSTRNIVELNMIDITYREYLENMNDKRPPHIIKTIASKT | | | | |
| | | QSIKKYSTDILGNLYEVKSKKHPQIIKKG | | | | |
| cCas9-v21 | Staphylococcus | MKRNYILGLDIGITSVGYGIIDYETRDVIDAGVRLFKEANVEN | 9,015 | N580A | H557A | D10A |
| | aureus | NEGRRSKRGARRLKRRRRHRIQRVKKLLFDYNLLTDHSELSG | | | | |
| | | INPYEARVKGLSQKLSEEEFSAALLHLAKRRGVHNVNEVEED | | | | |
| | | TGNELSTKEQISRNSKALEEKYVAELQLERLKKDGEVRGSINR | | | | |
| | | FKTSDYVKEAKQLLKVQKAYHQLDQSFIDTYIDLLETRRTYY | | | | |
| | | EGPGEGSPFGWKDIKEWYEMLMGHCTYFPEELRSVKYAYNA | | | | |
| | | DLYNALNDLNNLVITRDENEKLEYYEKFQIIENVFKQKKKPTL | | | | |
| | | KQIAKEILVNEEDIKGYRVTSTGKPEFTNLKVYHDIKDITARK | | | | |
| | | EIIENAELLDQIAKILTIYQSSEDIQEELTNLNSELTQEEIEQISN | | | | |
| | | LKGYTGTHNLSLKAINLILDELWHTNDNQIAIFNRLKLVPKKV | | | | |
| | | DLSQQKEIPTTLVDDFILSPVVKRSFIQSIKVINAIIKKYGLPNDI | | | | |
| | | IIELAREKNSKDAQKMINEMQKRNRQTNERIEEIIRTTGKENA | | | | |
| | | KYLIEKIKLHDMQEGKCLYSLEAIPLEDLLNNPFNYEVDHIIPR | | | | |
| | | SVSFDNSFNNKVLVKQEENSKKGNRTPFQYLSSSDSKISYETF | | | | |
| | | KKHILNLAKGKGRISKTKKEYLLEERDINRFSVQKDFINRNLV | | | | |
| | | DTRYATRGLMNLLRSYFRVNNLDVKVKSINGGFTSFLRRKW | | | | |
| | | KFKKERNKGYKHHAEDALIIANADFIFKEWKKLDKAKKVME | | | | |
| | | NQMFEEKQAESMPEIETEQEYKEIFITPHQIKHIKDFKDYKYSH | | | | |
| | | RVDKKPNRKLINDTLYSTRKDDKGNTLIVNNLNGLYDKDND | | | | |
| | | KLKKLINKSPEKLLMYHHDPQTYQKLKLIMEQYGDEKNPLY | | | | |
| | | KYYEETGNYLTKYSKKDNGPVIKKIKYYGNKLNAHLDITDD | | | | |
| | | YPNSRNKVVKLSLKPYRFDVYLDNGVYKFVTVKNLDVIKKE | | | | |
| | | NYYEVNSKCYEEAKKLKKISNQAEFIASFYKNDLIKINGELYR | | | | |
| | | VIGVNSDDRNIIELNMIDITYREYLENMNDKRPPHIIKTIASKT | | | | |
| | | QSIKKYSTDILGNLYEVKSKKHPQIIKKG | | | | |
| cCas9-v42 | Staphylococcus | MKRNYILGLDIGITSVGYGIIDYETRDVIDAGVRLFKEANVEN | 9,016 | N580A | H557A | D10A |
| | aureus | NEGRRSKRGARRLKRRRRHRIQRVKKLLFDYNLLTDHSELSG | | | | |
| | | INPYEARVKGLSQKLSEEEFSAALLHLAKRRGVHNVNEVEED | | | | |
| | | TGNELSTKEQISRNSKALEEKYVAELQLERLKKDGEVRGSINR | | | | |
| | | FKTSDYVKEAKQLLKVQKAYHQLDQSFIDTYIDLLETRRTYY | | | | |
| | | EGPGEGSPFGWKDIKEWYEMLMGHCTYFPEELRSVKYAYNA | | | | |
| | | DLYNALNDLNNLVITRDENEKLEYYEKFQIIENVFKQKKKPTL | | | | |
| | | KQIAKEILVNEEDIKGYRVTSTGKPEFTNLKVYHDIKDITARK | | | | |
| | | EIIENAELLDQIAKILTIYQSSEDIQEELTNLNSELTQEEIEQISN | | | | |
| | | LKGYTGTHNLSLKAINLILDELWHTNDNQIAIFNRLKLVPKKV | | | | |
| | | DLSQQKEIPTTLVDDFILSPVVKRSFIQSIKVINAIIKKYGLPNDI | | | | |
| | | IIELAREKNSKDAQKMINEMQKRNRQTNERIEEIIRTTGKENA | | | | |
| | | KYLIEKIKLHDMQEGKCLYSLEAIPLEDLLNNPFNYEVDHIIPR | | | | |
| | | SVSFDNSFNNKVLVKQEENSKKGNRTPFQYLSSSDSKISYETF | | | | |
| | | KKHILNLAKGKGRISKTKKEYLLEERDINRFSVQKDFINRNLV | | | | |
| | | DTRYATRGLMNLLRSYFRVNNLDVKVKSINGGFTSFLRRKW | | | | |
| | | KFKKERNKGYKHHAEDALIIANADFIFKEWKKLDKAKKVME | | | | |
| | | NQMFEEKQAESMPEIETEQEYKEIFITPHQIKHIKDFKDYKYSH | | | | |
| | | RVDKKPNRKLINDTLYSTRKDDKGNTLIVNNLNGLYDKDND | | | | |
| | | KLKKLINKSPEKLLMYHHDPQTYQKLKLIMEQYGDEKNPLY | | | | |
| | | KYYEETGNYLTKYSKKDNGPVIKKIKYYGNKLNAHLDITDD | | | | |
| | | YPNSRNKVVKLSLKPYRFDVYLDNGVYKFVTVKNLDVIKKE | | | | |
| | | NYYEVNSKCYEEAKKLKKISNQAEFIASFYKNDLIKINGELYR | | | | |
| | | VIGVNNNRLNKIELNMIDITYREYLENMNDKRPPHIIKTIASKT | | | | |
| | | QSIKKYSTDILGNLYEVKSKKHPQIIKKG | | | | |
| CdiCas9 | Corynebacterium | MKYHVGIDVGTFSVGLAAIEVDDAGMPIKTLSLVSHIHDSGL | 9,017 | N597A | H573A | D8A |
| | diphtheriae | DPDEIKSAVTRLASSGIARRTRRLYRRKRRRLQQLDKFIQRQG | | | | |
| | | WPVIELEDYSDPLYPWKVRAELAASYIADEKERGEKLSVALR | | | | |
| | | HIARHRGWRNPYAKVSSLYLPDGPSDAFKAIREEIKRASGQPV | | | | |
| | | PETATVGQMVTLCELGTLKLRGEGGVLSARLQQSDYAREIQE | | | | |
| | | ICRMQEIGQELYRKIIDVVFAAESPKGSASSRVGKDPLQPGKN | | | | |
| | | RALKASDAFQRYRIAALIGNLRVRVDGEKRILSVEEKNLVFD | | | | |
| | | HLVNLTPKKEPEWVTIAEILGIDRGQLIGTATMTDDGERAGA | | | | |
| | | RPPTHDTNRSIVNSRIAPLVDWWKTASALEQHAMVKALSNA | | | | |
| | | EVDDFDSPEGAKVQAFFADLDDDVHAKLDSLHLPVGRAAYS | | | | |
| | | EDTLVRLTRRMLSDGVDLYTARLQEFGIEPSWTPPTPRIGEPV | | | | |
| | | GNPAVDRVLKTVSRWLESATKTWGAPERVIIEHVREGFVTEK | | | | |
| | | RAREMDGDMRRRAARNAKLFQEMQEKLNVQGKPSRADLW | | | | |
| | | RYQSVQRQNCQCAYCGSPITFSNSEMDHIVPRAGQGSTNTRE | | | | |
| | | NLVAVCHRCNQSKGNTPFAIWAKNTSIEGVSVKEAVERTRH | | | | |
| | | WVTDTGMRSTDFKKFTKAVVERFQRATMDEEIDARSMESVA | | | | |
| | | WMANELRSRVAQHFASHGTTVRVYRGSLTAEARRASGISGK | | | | |
| | | LKFFDGVGKSRLDRRHHAIDAAVIAFTSDYVAETLAVRSNLK | | | | |
| | | QSQAHRQEAPQWREFTGKDAEHRAAWRVWCQKMEKLSALL | | | | |
| | | TEDLRDDRVVVMSNVRLRLGNGSAHKETIGKLSKVKLSSQLS | | | | |
| | | VSDIDKASSEALWCALTREPGFDPKEGLPANPERHIRVNGTH | | | | |
| | | VYAGDNIGLFPVSAGSIALRGGYAELGSSFHHARVYKITSGKK | | | | |
| | | PAFAMLRVYTIDLLPYRNQDLFSVELKPQTMSMRQAEKKLR | | | | |
| | | DALATGNAEYLGWLVVDDELVVDTSKIATDQVKAVEAELGT | | | | |
| | | IRRWRVDGFFSPSKLRLRPLQMSKEGIKKESAPELSKIIDRPGW | | | | |
| | | LPAVNKLFSDGNVTVVRRDSLGRVRLESTAHLPVTWKVQ | | | | |
| CjeCas9 | Campylobacter | MARILAFDIGISSIGWAFSENDELKDCGVRIFTKVENPKTGESL | 9,018 | N582A | H559A | D8A |
| | jejuni | ALPRRLARSARKRLARRKARLNHLKHLIANEFKLNYEDYQSF | | | | |
| | | DESLAKAYKGSLISPYELRFRALNELLSKQDFARVILHIAKRR | | | | |
| | | GYDDIKNSDDKEKGAILKAIKQNEEKLANYQSVGEYLYKEYF | | | | |
| | | QKFKENSKEFTNVRNKKESYERCIAQSFLKDELKLIFKKQREF | | | | |
| | | GFSFSKKFEEEVLSVAFYKRALKDFSHLVGNCSFFTDEKRAPK | | | | |
| | | NSPLAFMFVALTRIINLLNNLKNTEGILYTKDDLNALLNEVLK | | | | |
| | | NGTLTYKQTKKLLGLSDDYEFKGEKGTYFIEFKKYKEFIKAL | | | | |
| | | GEHNLSQDDLNEIAKDITLIKDEIKLKKALAKYDLNQNQIDSL | | | | |
| | | SKLEFKDHLNISFKALKLVTPLMLEGKKYDEACNELNLKVAI | | | | |
| | | NEDKKDFLPAFNETYYKDEVTNPVVLRAIKEYRKVLNALLK | | | | |
| | | KYGKVHKINIELAREVGKNHSQRAKIEKEQNENYKAKKDAE | | | | |
| | | LECEKLGLKINSKNILKLRLFKEQKEFCAYSGEKIKISDLQDEK | | | | |
| | | MLEIDHIYPYSRSFDDSYMNKVLVFTKQNQEKLNQTPFEAFG | | | | |
| | | NDSAKWQKIEVLAKNLPTKKQKRILDKNYKDKEQKNFKDRN | | | | |
| | | LNDTRYIARLVLNYTKDYLDFLPLSDDENTKLNDTQKGSKVH | | | | |
| | | VEAKSGMLTSALRHTWGFSAKDRNNHLHHAIDAVIIAYANN | | | | |
| | | SIVKAFSDFKKEQESNSAELYAKKISELDYKNKRKFFEPFSGF | | | | |
| | | RQKVLDKIDEIFVSKPERKKPSGALHEETFRKEEEFYQSYGGK | | | | |
| | | EGVLKALELGKIRKVNGKIVKNGDMFRVDIFKHKKTNKFYA | | | | |
| | | VPIYTMDFALKVLPNKAVARSKKGEIKDWILMDENYEFCFSL | | | | |
| | | YKDSLILIQTKDMQEPEFVYYNAFTSSTVSLIVSKHDNKFETLS | | | | |
| | | KNQKILFKNANEKEVIAKSIGIQNLKVFEKYIVSALGEVTKAE | | | | |
| | | FRQREDFKK | | | | |
| GeoCas9 | Geobacillus | MRYKIGLDIGITSVGWAVMNLDIPRIEDLGVRIFDRAENPQTG | 9,019 | N605A | H582A | D8A |
| | stearothermophilus | ESLALPRRLARSARRRLRRRKHRLERIRRLVIREGILTKEELDK | | | | |
| | | LFEEKHEIDVWQLRVEALDRKLNNDELARVLLHLAKRRGFK | | | | |
| | | SNRKSERSNKENSTMLKHIEENRAILSSYRTVGEMIVKDPKFA | | | | |
| | | LHKRNKGENYTNTIARDDLEREIRLIFSKQREFGNMSCTEEFE | | | | |
| | | NEYITIWASQRPVASKDDIEKKVGFCTFEPKEKRAPKATYTFQ | | | | |
| | | SFIAWEHINKLRLISPSGARGLTDEERRLLYEQAFQKNKITYH | | | | |
| | | DIRTLLHLPDDTYFKGIVYDRGESRKQNENIRFLELDAYHQIR | | | | |
| | | KAVDKVYGKGKSSSFLPIDFDTFGYALTLFKDDADIHSYLRN | | | | |
| | | EYEQNGKRMPNLANKVYDNELIEELLNLSFTKFGHLSLKALR | | | | |
| | | SILPYMEQGEVYSSACERAGYTFTGPKKKQKTMLLPNIPPIAN | | | | |
| | | PVVMRALTQARKVVNAIIKKYGSPVSIHIELARDLSQTFDERR | | | | |
| | | KTKKEQDENRKKNETAIRQLMEYGLTLNPTGHDIVKFKLWSE | | | | |
| | | QNGRCAYSLQPIEIERLLEPGYVEVDHVIPYSRSLDDSYTNKV | | | | |
| | | LVLTRENREKGNRIPAEYLGVGTERWQQFETFVLTNKQFSKK | | | | |
| | | KRDRLLRLHYDENEETEFKNRNLNDTRYISRFFANFIREHLKF | | | | |
| | | AESDDKQKVYTVNGRVTAHLRSRWEFNKNREESDLHHAVD | | | | |
| | | AVIVACTTPSDIAKVTAFYQRREQNKELAKKTEPHFPQPWPH | | | | |
| | | FADELRARLSKHPKESIKALNLGNYDDQKLESLQPVFVSRMP | | | | |
| | | KRSVTGAAHQETLRRYVGIDERSGKIQTVVKTKLSEIKLDASG | | | | |
| | | HFPMYGKESDPRTYEAIRQRLLEHNNDPKKAFQEPLYKPKKN | | | | |
| | | GEPGPVIRTVKIIDTKNQVIPLNDGKTVAYNSNIVRVDVFEKD | | | | |
| | | GKYYCVPVYTMDIMKGILPNKAIEPNKPYSEWKEMTEDYTFR | | | | |
| | | FSLYPNDLIRIELPREKTVKTAAGEEINVKDVFVYYKTIDSAN | | | | |
| | | GGLELISHDHRFSLRGVGSRTLKRFEKYQVDVLGNIYKVRGE | | | | |
| | | KRVGLASSAHSKPGKTIRPLQSTRD | | | | |
| iSpyMacCas9 | Streptococcus | MDKKYSIGLDIGTNSVGWAVITDEYKVPSKKFKVLGNTDRHS | 9,020 | N863A | H840A | D10A |
| | spp. | IKKNLIGALLFDSGETAEATRLKRTARRRYTRRKNRICYLQEIF | | | | |
| | | SNEMAKVDDSFFHRLEESFLVEEDKKHERHPIFGNIVDEVAY | | | | |
| | | HEKYPTIYHLRKKLVDSTDKADLRLIYLALAHMIKFRGHFLIE | | | | |
| | | GDLNPDNSDVDKLFIQLVQTYNQLFEENPINASGVDAKAILSA | | | | |
| | | RLSKSRKLENLIAQLPGEKKNGLFGNLIALSLGLTPNFKSNFD | | | | |
| | | LAEDAKLQLSKDTYDDDLDNLLAQIGDQYADLFLAAKNLSD | | | | |
| | | AILLSDILRVNTEITKAPLSASMIKRYDEHHQDLTLLKALVRQ | | | | |
| | | QLPEKYKEIFFDQSKNGYAGYIDGGASQEEFYKFIKPILEKMD | | | | |
| | | GTEELLVKLKREDLLRKQRTFDNGSIPHQIHLGELHAILRRQE | | | | |
| | | DFYPFLKDNREKIEKILTFRIPYYVGPLARGNSRFAWMIRKSE | | | | |
| | | ETITPWNFEEVVDKGASAQSFIERMTNFDKNLPNEKVLPKHSL | | | | |
| | | LYEYFTVYNELTKVKYVTEGMRKPAFLSGEQKKAIVDLLFKT | | | | |
| | | NRKVTVKQLKEDYFKKIECFDSVEISGVEDRFNASLGTYHDL | | | | |
| | | LKIIKDKDFLDNEENEDILEDIVLTLTLFEDREMIEERLKTYAH | | | | |
| | | LFDDKVMKQLKRRRYTGWGRLSRKLINGIRDKQSGKTILDFL | | | | |
| | | KSDGFANRNFMQLIHDDSLTFKEDIQKAQVSGQGDSLHEHIA | | | | |
| | | NLAGSPAIKKGILQTVKVVDELVKVMGRHKPENIVIEMAREN | | | | |
| | | QTTQKGQKNSRERMKRIEEGIKELGSQILKEHPVENTQLQNE | | | | |
| | | KLYLYYLQNGRDMYVDQELDINRLSDYDVDHIVPQSFLKDD | | | | |
| | | SIDNKVLTRSDKNRGKSDNVPSEEVVKKMKNYWRQLLNAKL | | | | |
| | | ITQRKFDNLTKAERGGLSELDKAGFIKRQLVETRQITKHVAQI | | | | |
| | | LDSRMNTKYDENDKLIREVKVITLKSKLVSDFRKDFQFYKVR | | | | |
| | | EINNYHHAHDAYLNAVVGTALIKKYPKLESEFVYGDYKVYD | | | | |
| | | VRKMIAKSEQEIGKATAKYFFYSNIMNFFKTEITLANGEIRKR | | | | |
| | | PLIETNGETGEIVWDKGRDFATVRKVLSMPQVNIVKKTEIQTV | | | | |
| | | GQNGGLFDDNPKSPLEVTPSKLVPLKKELNPKKYGGYQKPTT | | | | |
| | | AYPVLLITDTKQLIPISVMNKKQFEQNPVKFLRDRGYQQVGK | | | | |
| | | NDFIKLPKYTLVDIGDGIKRLWASSKEIHKGNQLVVSKKSQIL | | | | |
| | | LYHAHHLDSDLSNDYLQNHNQQFDVLFNEIISFSKKCKLGKE | | | | |
| | | HIQKIENVYSNKKNSASIEELAESFIKLLGFTQLGATSPFNFLG | | | | |
| | | VKLNQKQYKGKKDYILPCTEGTLIRQSITGLYETRVDLSKIGE | | | | |
| | | DSGGSGGSKRTADGSEFES | | | | |
| NmeCas9 | Neisseria | MAAFKPNSINYILGLDIGIASVGWAMVEIDEEENPIRLIDLGVR | 9,021 | N611A | H588A | D16A |
| | meningitidis | VFERAEVPKTGDSLAMARRLARSVRRLTRRRAHRLLRTRRLL | | | | |
| | | KREGVLQAANFDENGLIKSLPNTPWQLRAAALDRKLTPLEWS | | | | |
| | | AVLLHLIKHRGYLSQRKNEGETADKELGALLKGVAGNAHAL | | | | |
| | | QTGDFRTPAELALNKFEKESGHIRNQRSDYSHTFSRKDLQAEL | | | | |
| | | ILLFEKQKEFGNPHVSGGLKEGIETLLMTQRPALSGDAVQKM | | | | |
| | | LGHCTFEPAEPKAAKNTYTAERFIWLTKLNNLRILEQGSERPL | | | | |
| | | TDTERATLMDEPYRKSKLTYAQARKLLGLEDTAFFKGLRYG | | | | |
| | | KDNAEASTLMEMKAYHAISRALEKEGLKDKKSPLNLSPELQD | | | | |
| | | EIGTAFSLFKTDEDITGRLKDRIQPEILEALLKHISFDKFVQISL | | | | |
| | | KALRRIVPLMEQGKRYDEACAEIYGDHYGKKNTEEKIYLPPIP | | | | |
| | | ADEIRNPVVLRALSQARKVINGVVRRYGSPARIHIETAREVGK | | | | |
| | | SFKDRKEIEKRQEENRKDREKAAAKFREYFPNFVGEPKSKDIL | | | | |
| | | KLRLYEQQHGKCLYSGKEINLGRLNEKGYVEIDHALPFSRTW | | | | |
| | | DDSFNNKVLVLGSENQNKGNQTPYEYFNGKDNSREWQEFKA | | | | |
| | | RVETSRFPRSKKQRILLQKFDEDGFKERNLNDTRYVNRFLCQF | | | | |
| | | VADRMRLTGKGKKRVFASNGQITNLLRGFWGLRKVRAEND | | | | |
| | | RHHALDAVVVACSTVAMQQKITRFVRYKEMNAFDGKTIDKE | | | | |
| | | TGEVLHQKTHFPQPWEFFAQEVMIRVFGKPDGKPEFEEADTL | | | | |
| | | EKLRTLLAEKLSSRPEAVHEYVTPLFVSRAPNRKMSGQGHME | | | | |
| | | TVKSAKRLDEGVSVLRVPLTQLKLKDLEKMVNREREPKLYE | | | | |
| | | ALKARLEAHKDDPAKAFAEPFYKYDKAGNRTQQVKAVRVE | | | | |
| | | QVQKTGVWVRNHNGIADNATMVRVDVFEKGDKYYLVPIYS | | | | |
| | | WQVAKGILPDRAVVQGKDEEDWQLIDDSFNFKFSLHPNDLV | | | | |
| | | EVITKKARMFGYFASCHRGTGNINIRIHDLDHKIGKNGILEGIG | | | | |
| | | VKTALSFQKYQIDELGKEIRPCRLKKRPPVR | | | | |
| ScaCas9 | Streptococcus | MEKKYSIGLDIGTNSVGWAVITDDYKVPSKKFKVLGNTNRKS | 9,022 | N872A | H849A | D10A |
| | canis | IKKNLMGALLFDSGETAEATRLKRTARRRYTRRKNRIRYLQEI | | | | |
| | | FANEMAKLDDSFFQRLEESFLVEEDKKNERHPIFGNLADEVA | | | | |
| | | YHRNYPTIYHLRKKLADSPEKADLRLIYLALAHIIKFRGHFLIE | | | | |
| | | GKLNAENSDVAKLFYQLIQTYNQLFEESPLDEIEVDAKGILSA | | | | |
| | | RLSKSKRLEKLIAVFPNEKKNGLFGNIIALALGLTPNFKSNFDL | | | | |
| | | TEDAKLQLSKDTYDDDLDELLGQIGDQYADLFSAAKNLSDAI | | | | |
| | | LLSDILRSNSEVTKAPLSASMVKRYDEHHQDLALLKTLVRQQ | | | | |
| | | FPEKYAEIFKDDTKNGYAGYVGIGIKHRKRTTKLATQEEFYK | | | | |
| | | FIKPILEKMDGAEELLAKLNRDDLLRKQRTFDNGSIPHQIHLK | | | | |
| | | ELHAILRRQEEFYPFLKENREKIEKILTFRIPYYVGPLARGNSR | | | | |
| | | FAWLTRKSEEAITPWNFEEVVDKGASAQSFIERMTNFDEQLP | | | | |
| | | NKKVLPKHSLLYEYFTVYNELTKVKYVTERMRKPEFLSGEQ | | | | |
| | | KKAIVDLLFKTNRKVTVKQLKEDYFKKIECFDSVEIIGVEDRF | | | | |
| | | NASLGTYHDLLKIIKDKDFLDNEENEDILEDIVLTLTLFEDRE | | | | |
| | | MIEERLKTYAHLFDDKVMKQLKRRHYTGWGRLSRKMINGIR | | | | |
| | | DKQSGKTILDFLKSDGFSNRNFMQLIHDDSLTFKEEIEKAQVS | | | | |
| | | GQGDSLHEQIADLAGSPAIKKGILQTVKIVDELVKVMGHKPE | | | | |
| | | NIVIEMARENQTTTKGLQQSRERKKRIEEGIKELESQILKENPV | | | | |
| | | ENTQLQNEKLYLYYLQNGRDMYVDQELDINRLSDYDVDHIV | | | | |
| | | PQSFIKDDSIDNKVLTRSVENRGKSDNVPSEEVVKKMKNYWR | | | | |
| | | QLLNAKLITQRKFDNLTKAERGGLSEADKAGFIKRQLVETRQI | | | | |
| | | TKHVARILDSRMNTKRDKNDKPIREVKVITLKSKLVSDFRKD | | | | |
| | | FQLYKVRDINNYHHAHDAYLNAVVGTALIKKYPKLESEFVY | | | | |
| | | GDYKVYDVRKMIAKSEQEIGKATAKRFFYSNIMNFFKTEVKL | | | | |
| | | ANGEIRKRPLIETNGETGEVVWNKEKDFATVRKVLAMPQVNI | | | | |
| | | VKKTEVQTGGFSKESILSKRESAKLIPRKKGWDTRKYGGFGS | | | | |
| | | PTVAYSILVVAKVEKGKAKKLKSVKVLVGITIMEKGSYEKDP | | | | |
| | | IGFLEAKGYKDIKKELIFKLPKYSLFELENGRRRMLASATELQ | | | | |
| | | KANELVLPQHLVRLLYYTQNISATTGSNNLGYIEQHREEFKEI | | | | |
| | | FEKIIDFSEKYILKNKVNSNLKSSFDEQFAVSDSILLSNSFVSLL | | | | |
| | | KYTSFGASGGFTFLDLDVKQGRLRYQTVTEVLDATLIYQSITG | | | | |
| | | LYETRTDLSQLGGD | | | | |
| ScaCas9- | Streptococcus | MEKKYSIGLDIGTNSVGWAVITDDYKVPSKKFKVLGNTNRKS | 9,023 | N872A | H849A | D10A |
| HiFi-Sc++ | canis | IKKNLMGALLFDSGETAEATRLKRTARRRYTRRKNRIRYLQEI | | | | |
| | | FANEMAKLDDSFFQRLEESFLVEEDKKNERHPIFGNLADEVA | | | | |
| | | YHRNYPTIYHLRKKLADSPEKADLRLIYLALAHIIKFRGHFLIE | | | | |
| | | GKLNAENSDVAKLFYQLIQTYNQLFEESPLDEIEVDAKGILSA | | | | |
| | | RLSKSKRLEKLIAVFPNEKKNGLFGNIIALALGLTPNFKSNFDL | | | | |
| | | TEDAKLQLSKDTYDDDLDELLGQIGDQYADLFSAAKNLSDAI | | | | |
| | | LLSDILRSNSEVTKAPLSASMVKRYDEHHQDLALLKTLVRQQ | | | | |
| | | FPEKYAEIFKDDTKNGYAGYVGADKKLRKRSGKLATEEEFY | | | | |
| | | KFIKPILEKMDGAEELLAKLNRDDLLRKQRTFDNGSIPHQIHL | | | | |
| | | KELHAILRRQEEFYPFLKENREKIEKILTFRIPYYVGPLARGNS | | | | |
| | | RFAWLTRKSEEAITPWNFEEVVDKGASAQSFIERMTNFDEQL | | | | |
| | | PNKKVLPKHSLLYEYFTVYNELTKVKYVTERMRKPEFLSGEQ | | | | |
| | | KKAIVDLLFKTNRKVTVKQLKEDYFKKIECFDSVEIIGVEDRF | | | | |
| | | NASLGTYHDLLKIIKDKDFLDNEENEDILEDIVLTLTLFEDRE | | | | |
| | | MIEERLKTYAHLFDDKVMKQLKRRHYTGWGRLSRKMINGIR | | | | |
| | | DKQSGKTILDFLKSDGFSNANFMQLIHDDSLTFKEEIEKAQVS | | | | |
| | | GQGDSLHEQIADLAGSPAIKKGILQTVKIVDELVKVMGHKPE | | | | |
| | | NIVIEMARENQTTTKGLQQSRERKKRIEEGIKELESQILKENPV | | | | |
| | | ENTQLQNEKLYLYYLQNGRDMYVDQELDINRLSDYDVDHIV | | | | |
| | | PQSFIKDDSIDNKVLTRSVENRGKSDNVPSEEVVKKMKNYWR | | | | |
| | | QLLNAKLITQRKFDNLTKAERGGLSEADKAGFIKRQLVETRQI | | | | |
| | | TKHVARILDSRMNTKRDKNDKPIREVKVITLKSKLVSDFRKD | | | | |
| | | FQLYKVRDINNYHHAHDAYLNAVVGTALIKKYPKLESEFVY | | | | |
| | | GDYKVYDVRKMIAKSEQEIGKATAKRFFYSNIMNFFKTEVKL | | | | |
| | | ANGEIRKRPLIETNGETGEVVWNKEKDFATVRKVLAMPQVNI | | | | |
| | | VKKTEVQTGGFSKESILSKRESAKLIPRKKGWDTRKYGGFGS | | | | |
| | | PTVAYSILVVAKVEKGKAKKLKSVKVLVGITIMEKGSYEKDP | | | | |
| | | IGFLEAKGYKDIKKELIFKLPKYSLFELENGRRRMLASAKELQ | | | | |
| | | KANELVLPQHLVRLLYYTQNISATTGSNNLGYIEQHREEFKEI | | | | |
| | | FEKIIDFSEKYILKNKVNSNLKSSFDEQFAVSDSILLSNSFVSLL | | | | |
| | | KYTSFGASGGFTFLDLDVKQGRLRYQTVTEVLDATLIYQSITG | | | | |
| | | LYETRTDLSQLGGD | | | | |
| SpyCas9- | Streptococcus | MDKKYSIGLDIGTNSVGWAVITDEYKVPSKKFKVLGNTDRHS | 9,024 | N863A | H840A | D10A |
| 3var- | pyogenes | IKKNLIGALLFDSGETAEATRLKRTARRRYTRRKNRICYLQEIF | | | | |
| NRRH | | SNEMAKVDDSFFHRLEESFLVEEDKKHERHPIFGNIVDEVAY | | | | |
| | | HEKYPTIYHLRKKLVDSTDKADLRLIYLALAHMIKFRGHFLIE | | | | |
| | | GDLNPDNSDVDKLFIQLVQTYNQLFEENPINASGVDAKAILSA | | | | |
| | | RLSKSRRLENLIAQLPGEKKNGLFGNLIALSLGLTPNFKSNFDL | | | | |
| | | AEDAKLQLSKDTYDDDLDNLLAQIGDQYADLFLAAKNLSDA | | | | |
| | | ILLSDILRVNTEITKAPLSASMVKRYDEHHQDLTLLKALVRQQ | | | | |
| | | LPEKYKEIFFDQSKNGYAGYIDGGASQEEFYKFIKPILEKMDG | | | | |
| | | TEELLVKLNREDLLRKQRTFDNGIIPHQIHLGELHAILRRQGDF | | | | |
| | | YPFLKDNREKIEKILTFRIPYYVGPLARGNSRFAWMTRKSEETI | | | | |
| | | TPWNFEEVVDKGASAQSFIERMTNFDKNLPNEKVLPKHSLLY | | | | |
| | | EYFTVYNELTKVKYVTEGMRKPAFLSGEQKKAIVDLLFKTNR | | | | |
| | | KVTVKQLKEDYFKKIECFDSVEISGVEDRFNASLGTYHDLLKI | | | | |
| | | IKDKDFLDNEENEDILEDIVLTLTLFEDREMIEERLKTYAHLFD | | | | |
| | | DKVMKQLKRLRYTGWGRLSRKLINGIRDKQSGKTILDFLKSD | | | | |
| | | GFANRNFMQLIHDDSLTFKEDIQKAQVSGQGDSLHEHIANLA | | | | |
| | | GSPAIKKGILQTVKVVDELVKVMGGHKPENIVIEMARENQTT | | | | |
| | | QKGQKNSRERMKRIEEGIKELGSQILKEHPVENTQLQNEKLY | | | | |
| | | LYYLQNGRDMYVDQELDINRLSDYDVDHIVPQSFLKDDSIDN | | | | |
| | | KVLTRSDKNRGKSDNVPSEEVVKKMKNYWRQLLNAKLITQR | | | | |
| | | KFDNLTKAERGGLSELDKAGFIKRQLVETRQITKHVAQILDSR | | | | |
| | | MNTKYDENDKLIREVKVITLKSKLVSDFRKDFQFYKVREINN | | | | |
| | | YHHAHDAYLNAVVGTALIKKYPKLESEFVYGDYKVYDVRK | | | | |
| | | MIAKSEQEIGKATAKYFFYSNIMNFFKTEITLANGEIRKRPLIE | | | | |
| | | TNGETGEIVWDKGRDFATVRKVLSMPQVNIVKKTEVQTGGF | | | | |
| | | SKESILPKGNSDKLIARKKDWDPKKYGGFNSPTAAYSVLVVA | | | | |
| | | KVEKGKSKKLKSVKELLGITIMERSSFEKNPIGFLEAKGYKEV | | | | |
| | | KKDLIIKLPKYSLFELENGRKRMLASAGVLHKGNELALPSKY | | | | |
| | | VNFLYLASHYEKLKGSPEDNEQKQLFVEQHKHYLDEIIEQISE | | | | |
| | | FSKRVILADANLDKVLSAYNKHRDKPIREQAENIIHLFTLTNL | | | | |
| | | GVPAAFKYFDTTIDKKRYTSTKEVLDATLIHQSITGLYETRIDL | | | | |
| | | SQLGGD | | | | |
| Spy Cas9- | Streptococcus | MDKKYSIGLDIGTNSVGWAVITDEYKVPSKKFKVLGNTDRHS | 9,025 | N863A | H840A | D10A |
| 3var- | pyogenes | IKKNLIGALLFDSGETAEATRLKRTARRRYTRRKNRICYLQEIF | | | | |
| NRTH | | SNEMAKVDDSFFHRLEESFLVEEDKKHERHPIFGNIVDEVAY | | | | |
| | | HEKYPTIYHLRKKLVDSTDKADLRLIYLALAHMIKFRGHFLIE | | | | |
| | | GDLNPDNSDVDKLFIQLVQTYNQLFEENPINASGVDAKAILSA | | | | |
| | | RLSKSRRLENLIAQLPGEKKNGLFGNLIALSLGLTPNFKSNFDL | | | | |
| | | AEDAKLQLSKDTYDDDLDNLLAQIGDQYADLFLAAKNLSDA | | | | |
| | | ILLSDILRVNTEITKAPLSASMVKRYDEHHQDLTLLKALVRQQ | | | | |
| | | LPEKYKEIFFDQSKNGYAGYIDGGASQEEFYKFIKPILEKMDG | | | | |
| | | TEELLVKLNREDLLRKQRTFDNGIIPHQIHLGELHAILRRQGDF | | | | |
| | | YPFLKDNREKIEKILTFRIPYYVGPLARGNSRFAWMTRKSEETI | | | | |
| | | TPWNFEEVVDKGASAQSFIERMTNFDKNLPNEKVLPKHSLLY | | | | |
| | | EYFTVYNELTKVKYVTEGMRKPAFLSGEQKKAIVDLLFKTNR | | | | |
| | | KVTVKQLKEDYFKKIECFDSVEISGVEDRFNASLGTYHDLLKI | | | | |
| | | IKDKDFLDNEENEDILEDIVLTLTLFEDREMIEERLKTYAHLFD | | | | |
| | | DKVMKQLKRLRYTGWGRLSRKLINGIRDKQSGKTILDFLKSD | | | | |
| | | GFANRNFMQLIHDDSLTFKEDIQKAQVSGQGDSLHEHIANLA | | | | |
| | | GSPAIKKGILQTVKVVDELVKVMGGHKPENIVIEMARENQTT | | | | |
| | | QKGQKNSRERMKRIEEGIKELGSQILKEHPVENTQLQNEKLY | | | | |
| | | LYYLQNGRDMYVDQELDINRLSDYDVDHIVPQSFLKDDSIDN | | | | |
| | | KVLTRSDKNRGKSDNVPSEEVVKKMKNYWRQLLNAKLITQR | | | | |
| | | KFDNLTKAERGGLSELDKAGFIKRQLVETRQITKHVAQILDSR | | | | |
| | | MNTKYDENDKLIREVKVITLKSKLVSDFRKDFQFYKVREINN | | | | |
| | | YHHAHDAYLNAVVGTALIKKYPKLESEFVYGDYKVYDVRK | | | | |
| | | MIAKSEQEIGKATAKYFFYSNIMNFFKTEITLANGEIRKRPLIE | | | | |
| | | TNGETGEIVWDKGRDFATVRKVLSMPQVNIVKKTEVQTGGF | | | | |
| | | SKESILPKGNSDKLIARKKDWDPKKYGGFNSPTVAYSVLVVA | | | | |
| | | KVEKGKSKKLKSVKELLGITIMERSSFEKNPIGFLEAKGYKEV | | | | |
| | | KKDLIIKLPKYSLFELENGRKRMLASASVLHKGNELALPSKY | | | | |
| | | VNFLYLASHYEKLKGSSEDNKQKQLFVEQHKHYLDEIIEQISE | | | | |
| | | FSKRVILADANLDKVLSAYNKHRDKPIREQAENIIHLFTLTNL | | | | |
| | | GASAAFKYFDTTIGRKLYTSTKEVLDATLIHQSITGLYETRIDL | | | | |
| | | SQLGGD | | | | |
| Spy Cas9- | Streptococcus | MDKKYSIGLDIGTNSVGWAVITDEYKVPSKKFKVLGNTDRHS | 9,026 | N863A | H840A | D10A |
| 3var- | pyogenes | IKKNLIGALLFDSGETAEATRLKRTARRRYTRRKNRICYLQEIF | | | | |
| NRCH | | SNEMAKVDDSFFHRLEESFLVEEDKKHERHPIFGNIVDEVAY | | | | |
| | | HEKYPTIYHLRKKLVDSTDKADLRLIYLALAHMIKFRGHFLIE | | | | |
| | | GDLNPDNSDVDKLFIQLVQTYNQLFEENPINASGVDAKAILSA | | | | |
| | | RLSKSRRLENLIAQLPGEKKNGLFGNLIALSLGLTPNFKSNFDL | | | | |
| | | AEDAKLQLSKDTYDDDLDNLLAQIGDQYADLFLAAKNLSDA | | | | |
| | | ILLSDILRVNTEITKAPLSASMVKRYDEHHQDLTLLKALVRQQ | | | | |
| | | LPEKYKEIFFDQSKNGYAGYIDGGASQEEFYKFIKPILEKMDG | | | | |
| | | TEELLVKLNREDLLRKQRTFDNGIIPHQIHLGELHAILRRQGDF | | | | |
| | | YPFLKDNREKIEKILTFRIPYYVGPLARGNSRFAWMTRKSEETI | | | | |
| | | TPWNFEEVVDKGASAQSFIERMTNFDKNLPNEKVLPKHSLLY | | | | |
| | | EYFTVYNELTKVKYVTEGMRKPAFLSGEQKKAIVDLLFKTNR | | | | |
| | | KVTVKQLKEDYFKKIECFDSVEISGVEDRFNASLGTYHDLLKI | | | | |
| | | IKDKDFLDNEENEDILEDIVLTLTLFEDREMIEERLKTYAHLFD | | | | |
| | | DKVMKQLKRLRYTGWGRLSRKLINGIRDKQSGKTILDFLKSD | | | | |
| | | GFANRNFMQLIHDDSLTFKEDIQKAQVSGQGDSLHEHIANLA | | | | |
| | | GSPAIKKGILQTVKVVDELVKVMGGHKPENIVIEMARENQTT | | | | |
| | | QKGQKNSRERMKRIEEGIKELGSQILKEHPVENTQLQNEKLY | | | | |
| | | LYYLQNGRDMYVDQELDINRLSDYDVDHIVPQSFLKDDSIDN | | | | |
| | | KVLTRSDKNRGKSDNVPSEEVVKKMKNYWRQLLNAKLITQR | | | | |
| | | KFDNLTKAERGGLSELDKAGFIKRQLVETRQITKHVAQILDSR | | | | |
| | | MNTKYDENDKLIREVKVITLKSKLVSDFRKDFQFYKVREINN | | | | |
| | | YHHAHDAYLNAVVGTALIKKYPKLESEFVYGDYKVYDVRK | | | | |
| | | MIAKSEQEIGKATAKYFFYSNIMNFFKTEITLANGEIRKRPLIE | | | | |
| | | TNGETGEIVWDKGRDFATVRKVLSMPQVNIVKKTEVQTGGF | | | | |
| | | SKESILPKGNSDKLIARKKDWDPKKYGGFNSPTVAYSVLVVA | | | | |
| | | KVEKGKSKKLKSVKELLGITIMERSSFEKNPIDFLEAKGYKEV | | | | |
| | | KKDLIIKLPKYSLFELENGRKRMLASAGVLQKGNELALPSKY | | | | |
| | | VNFLYLASHYEKLKGSPEDNEQKQLFVEQHKHYLDEIIEQISE | | | | |
| | | FSKRVILADANLDKVLSAYNKHRDKPIREQAENIIHLFTLTNL | | | | |
| | | GAPAAFKYFDTTINRKQYNTTKEVLDATLIRQSITGLYETRID | | | | |
| | | LSQLGGD | | | | |
| SpyCas9- | Streptococcus | MDKKYSIGLDIGTNSVGWAVITDEYKVPSKKFKVLGNTDRHS | 9,027 | N863A | H840A | D10A |
| HF1 | pyogenes | IKKNLIGALLFDSGETAEATRLKRTARRRYTRRKNRICYLQEIF | | | | |
| | | SNEMAKVDDSFFHRLEESFLVEEDKKHERHPIFGNIVDEVAY | | | | |
| | | HEKYPTIYHLRKKLVDSTDKADLRLIYLALAHMIKFRGHFLIE | | | | |
| | | GDLNPDNSDVDKLFIQLVQTYNQLFEENPINASGVDAKAILSA | | | | |
| | | RLSKSRRLENLIAQLPGEKKNGLFGNLIALSLGLTPNFKSNFDL | | | | |
| | | AEDAKLQLSKDTYDDDLDNLLAQIGDQYADLFLAAKNLSDA | | | | |
| | | ILLSDILRVNTEITKAPLSASMIKRYDEHHQDLTLLKALVRQQ | | | | |
| | | LPEKYKEIFFDQSKNGYAGYIDGGASQEEFYKFIKPILEKMDG | | | | |
| | | TEELLVKLNREDLLRKQRTFDNGSIPHQIHLGELHAILRRQED | | | | |
| | | FYPFLKDNREKIEKILTFRIPYYVGPLARGNSRFAWMTRKSEE | | | | |
| | | TITPWNFEEVVDKGASAQSFIERMTNFDKNLPNEKVLPKHSLL | | | | |
| | | YEYFTVYNELTKVKYVTEGMRKPAFLSGEQKKAIVDLLFKTN | | | | |
| | | RKVTVKQLKEDYFKKIECFDSVEISGVEDRFNASLGTYHDLL | | | | |
| | | KIIKDKDFLDNEENEDILEDIVLTLTLFEDREMIEERLKTYAHL | | | | |
| | | FDDKVMKQLKRRRYTGWGRLSRKLINGIRDKQSGKTILDFLK | | | | |
| | | SDGFANRNFMQLIHDDSLTFKEDIQKAQVSGQGDSLHEHIAN | | | | |
| | | LAGSPAIKKGILQTVKVVDELVKVMGRHKPENIVIEMARENQ | | | | |
| | | TTQKGQKNSRERMKRIEEGIKELGSQILKEHPVENTQLQNEKL | | | | |
| | | YLYYLQNGRDMYVDQELDINRLSDYDVDHIVPQSFLKDDSID | | | | |
| | | NKVLTRSDKNRGKSDNVPSEEVVKKMKNYWRQLLNAKLITQ | | | | |
| | | RKFDNLTKAERGGLSELDKAGFIKRQLVETRQITKHVAQILDS | | | | |
| | | RMNTKYDENDKLIREVKVITLKSKLVSDFRKDFQFYKVREIN | | | | |
| | | NYHHAHDAYLNAVVGTALIKKYPKLESEFVYGDYKVYDVR | | | | |
| | | KMIAKSEQEIGKATAKYFFYSNIMNFFKTEITLANGEIRKRPLI | | | | |
| | | ETNGETGEIVWDKGRDFATVRKVLSMPQVNIVKKTEVQTGG | | | | |
| | | FSKESILPKRNSDKLIARKKDWDPKKYGGFDSPTVAYSVLVV | | | | |
| | | AKVEKGKSKKLKSVKELLGITIMERSSFEKNPIDFLEAKGYKE | | | | |
| | | VKKDLIIKLPKYSLFELENGRKRMLASAGELQKGNELALPSK | | | | |
| | | YVNFLYLASHYEKLKGSPEDNEQKQLFVEQHKHYLDEIIEQIS | | | | |
| | | EFSKRVILADANLDKVLSAYNKHRDKPIREQAENIIHLFTLTN | | | | |
| | | LGAPAAFKYFDTTIDRKRYTSTKEVLDATLIHQSITGLYETRID | | | | |
| | | LSQLGGD | | | | |
| SpyCas9- | Streptococcus | MDKKYSIGLDIGTNSVGWAVITDEYKVPSKKFKVLGNTDRHS | 9,028 | N863A | H840A | D10A |
| QQR1 | pyogenes | IKKNLIGALLFDSGETAEATRLKRTARRRYTRRKNRICYLQEIF | | | | |
| | | SNEMAKVDDSFFHRLEESFLVEEDKKHERHPIFGNIVDEVAY | | | | |
| | | HEKYPTIYHLRKKLVDSTDKADLRLIYLALAHMIKFRGHFLIE | | | | |
| | | GDLNPDNSDVDKLFIQLVQTYNQLFEENPINASGVDAKAILSA | | | | |
| | | RLSKSRRLENLIAQLPGEKKNGLFGNLIALSLGLTPNFKSNFDL | | | | |
| | | AEDAKLQLSKDTYDDDLDNLLAQIGDQYADLFLAAKNLSDA | | | | |
| | | ILLSDILRVNTEITKAPLSASMIKRYDEHHQDLTLLKALVRQQ | | | | |
| | | LPEKYKEIFFDQSKNGYAGYIDGGASQEEFYKFIKPILEKMDG | | | | |
| | | TEELLVKLNREDLLRKQRTFDNGSIPHQIHLGELHAILRRQED | | | | |
| | | FYPFLKDNREKIEKILTFRIPYYVGPLARGNSRFAWMTRKSEE | | | | |
| | | TITPWNFEEVVDKGASAQSFIERMTNFDKNLPNEKVLPKHSLL | | | | |
| | | YEYFTVYNELTKVKYVTEGMRKPAFLSGEQKKAIVDLLFKTN | | | | |
| | | RKVTVKQLKEDYFKKIECFDSVEISGVEDRFNASLGTYHDLL | | | | |
| | | KIIKDKDFLDNEENEDILEDIVLTLTLFEDREMIEERLKTYAHL | | | | |
| | | FDDKVMKQLKRRRYTGWGRLSRKLINGIRDKQSGKTILDFLK | | | | |
| | | SDGFANRNFMQLIHDDSLTFKEDIQKAQVSGQGDSLHEHIAN | | | | |
| | | LAGSPAIKKGILQTVKVVDELVKVMGRHKPENIVIEMARENQ | | | | |
| | | TTQKGQKNSRERMKRIEEGIKELGSQILKEHPVENTQLQNEKL | | | | |
| | | YLYYLQNGRDMYVDQELDINRLSDYDVDHIVPQSFLKDDSID | | | | |
| | | NKVLTRSDKNRGKSDNVPSEEVVKKMKNYWRQLLNAKLITQ | | | | |
| | | RKFDNLTKAERGGLSELDKAGFIKRQLVETRQITKHVAQILDS | | | | |
| | | RMNTKYDENDKLIREVKVITLKSKLVSDFRKDFQFYKVREIN | | | | |
| | | NYHHAHDAYLNAVVGTALIKKYPKLESEFVYGDYKVYDVR | | | | |
| | | KMIAKSEQEIGKATAKYFFYSNIMNFFKTEITLANGEIRKRPLI | | | | |
| | | ETNGETGEIVWDKGRDFATVRKVLSMPQVNIVKKTEVQTGG | | | | |
| | | FSKESILPKRNSDKLIARKKDWDPKKYGGFDSPTVAYSVLVV | | | | |
| | | AKVEKGKSKKLKSVKELLGITIMERSSFEKNPIDFLEAKGYKE | | | | |
| | | VKKDLIIKLPKYSLFELENGRKRMLASARELQKGNELALPSK | | | | |
| | | YVNFLYLASHYEKLKGSPEDNEQKQLFVEQHKHYLDEIIEQIS | | | | |
| | | EFSKRVILADAQLDKVLSAYNKHRDKPIREQAENIIHLFTLTN | | | | |
| | | LGAPAAFKYFDTTFKQKQYRSTKEVLDATLIHQSITGLYETRI | | | | |
| | | DLSQLGGD | | | | |
| SpyCas9- | Streptococcus | MDKKYSIGLDIGTNSVGWAVITDEYKVPSKKFKVLGNTDRHS | 9,029 | N863A | H840A | D10A |
| SpG | pyogenes | IKKNLIGALLFDSGETAEATRLKRTARRRYTRRKNRICYLQEIF | | | | |
| | | SNEMAKVDDSFFHRLEESFLVEEDKKHERHPIFGNIVDEVAY | | | | |
| | | HEKYPTIYHLRKKLVDSTDKADLRLIYLALAHMIKFRGHFLIE | | | | |
| | | GDLNPDNSDVDKLFIQLVQTYNQLFEENPINASGVDAKAILSA | | | | |
| | | RLSKSRRLENLIAQLPGEKKNGLFGNLIALSLGLTPNFKSNFDL | | | | |
| | | AEDAKLQLSKDTYDDDLDNLLAQIGDQYADLFLAAKNLSDA | | | | |
| | | ILLSDILRVNTEITKAPLSASMIKRYDEHHQDLTLLKALVRQQ | | | | |
| | | LPEKYKEIFFDQSKNGYAGYIDGGASQEEFYKFIKPILEKMDG | | | | |
| | | TEELLVKLNREDLLRKQRTFDNGSIPHQIHLGELHAILRRQED | | | | |
| | | FYPFLKDNREKIEKILTFRIPYYVGPLARGNSRFAWMTRKSEE | | | | |
| | | TITPWNFEEVVDKGASAQSFIERMTNFDKNLPNEKVLPKHSLL | | | | |
| | | YEYFTVYNELTKVKYVTEGMRKPAFLSGEQKKAIVDLLFKTN | | | | |
| | | RKVTVKQLKEDYFKKIECFDSVEISGVEDRFNASLGTYHDLL | | | | |
| | | KIIKDKDFLDNEENEDILEDIVLTLTLFEDREMIEERLKTYAHL | | | | |
| | | FDDKVMKQLKRRRYTGWGRLSRKLINGIRDKQSGKTILDFLK | | | | |
| | | SDGFANRNFMQLIHDDSLTFKEDIQKAQVSGQGDSLHEHIAN | | | | |
| | | LAGSPAIKKGILQTVKVVDELVKVMGRHKPENIVIEMARENQ | | | | |
| | | TTQKGQKNSRERMKRIEEGIKELGSQILKEHPVENTQLQNEKL | | | | |
| | | YLYYLQNGRDMYVDQELDINRLSDYDVDHIVPQSFLKDDSID | | | | |
| | | NKVLTRSDKNRGKSDNVPSEEVVKKMKNYWRQLLNAKLITQ | | | | |
| | | RKFDNLTKAERGGLSELDKAGFIKRQLVETRQITKHVAQILDS | | | | |
| | | RMNTKYDENDKLIREVKVITLKSKLVSDFRKDFQFYKVREIN | | | | |
| | | NYHHAHDAYLNAVVGTALIKKYPKLESEFVYGDYKVYDVR | | | | |
| | | KMIAKSEQEIGKATAKYFFYSNIMNFFKTEITLANGEIRKRPLI | | | | |
| | | ETNGETGEIVWDKGRDFATVRKVLSMPQVNIVKKTEVQTGG | | | | |
| | | FSKESILPKRNSDKLIARKKDWDPKKYGGFLWPTVAYSVLVV | | | | |
| | | AKVEKGKSKKLKSVKELLGITIMERSSFEKNPIDFLEAKGYKE | | | | |
| | | VKKDLIIKLPKYSLFELENGRKRMLASAKQLQKGNELALPSK | | | | |
| | | YVNFLYLASHYEKLKGSPEDNEQKQLFVEQHKHYLDEIIEQIS | | | | |
| | | EFSKRVILADANLDKVLSAYNKHRDKPIREQAENIIHLFTLTN | | | | |
| | | LGAPAAFKYFDTTIDRKQYRSTKEVLDATLIHQSITGLYETRID | | | | |
| | | LSQLGGD | | | | |
| SpyCas9- | Streptococcus | MDKKYSIGLDIGTNSVGWAVITDEYKVPSKKFKVLGNTDRHS | 9,030 | N863A | H840A | D10A |
| VQR | pyogenes | IKKNLIGALLFDSGETAEATRLKRTARRRYTRRKNRICYLQEIF | | | | |
| | | SNEMAKVDDSFFHRLEESFLVEEDKKHERHPIFGNIVDEVAY | | | | |
| | | HEKYPTIYHLRKKLVDSTDKADLRLIYLALAHMIKFRGHFLIE | | | | |
| | | GDLNPDNSDVDKLFIQLVQTYNQLFEENPINASGVDAKAILSA | | | | |
| | | RLSKSRRLENLIAQLPGEKKNGLFGNLIALSLGLTPNFKSNFDL | | | | |
| | | AEDAKLQLSKDTYDDDLDNLLAQIGDQYADLFLAAKNLSDA | | | | |
| | | ILLSDILRVNTEITKAPLSASMIKRYDEHHQDLTLLKALVRQQ | | | | |
| | | LPEKYKEIFFDQSKNGYAGYIDGGASQEEFYKFIKPILEKMDG | | | | |
| | | TEELLVKLNREDLLRKQRTFDNGSIPHQIHLGELHAILRRQED | | | | |
| | | FYPFLKDNREKIEKILTFRIPYYVGPLARGNSRFAWMTRKSEE | | | | |
| | | TITPWNFEEVVDKGASAQSFIERMTNFDKNLPNEKVLPKHSLL | | | | |
| | | YEYFTVYNELTKVKYVTEGMRKPAFLSGEQKKAIVDLLFKTN | | | | |
| | | RKVTVKQLKEDYFKKIECFDSVEISGVEDRFNASLGTYHDLL | | | | |
| | | KIIKDKDFLDNEENEDILEDIVLTLTLFEDREMIEERLKTYAHL | | | | |
| | | FDDKVMKQLKRRRYTGWGRLSRKLINGIRDKQSGKTILDFLK | | | | |
| | | SDGFANRNFMQLIHDDSLTFKEDIQKAQVSGQGDSLHEHIAN | | | | |
| | | LAGSPAIKKGILQTVKVVDELVKVMGRHKPENIVIEMARENQ | | | | |
| | | TTQKGQKNSRERMKRIEEGIKELGSQILKEHPVENTQLQNEKL | | | | |
| | | YLYYLQNGRDMYVDQELDINRLSDYDVDHIVPQSFLKDDSID | | | | |
| | | NKVLTRSDKNRGKSDNVPSEEVVKKMKNYWRQLLNAKLITQ | | | | |
| | | RKFDNLTKAERGGLSELDKAGFIKRQLVETRQITKHVAQILDS | | | | |
| | | RMNTKYDENDKLIREVKVITLKSKLVSDFRKDFQFYKVREIN | | | | |
| | | NYHHAHDAYLNAVVGTALIKKYPKLESEFVYGDYKVYDVR | | | | |
| | | KMIAKSEQEIGKATAKYFFYSNIMNFFKTEITLANGEIRKRPLI | | | | |
| | | ETNGETGEIVWDKGRDFATVRKVLSMPQVNIVKKTEVQTGG | | | | |
| | | FSKESILPKRNSDKLIARKKDWDPKKYGGFVSPTVAYSVLVV | | | | |
| | | AKVEKGKSKKLKSVKELLGITIMERSSFEKNPIDFLEAKGYKE | | | | |
| | | VKKDLIIKLPKYSLFELENGRKRMLASAGELQKGNELALPSK | | | | |
| | | YVNFLYLASHYEKLKGSPEDNEQKQLFVEQHKHYLDEIIEQIS | | | | |
| | | EFSKRVILADANLDKVLSAYNKHRDKPIREQAENIIHLFTLTN | | | | |
| | | LGAPAAFKYFDTTIDRKQYRSTKEVLDATLIHQSITGLYETRID | | | | |
| | | LSQLGGD | | | | |
| SpyCas9- | Streptococcus | MDKKYSIGLDIGTNSVGWAVITDEYKVPSKKFKVLGNTDRHS | 9,031 | N863A | H840A | D10A |
| VRER | pyogenes | IKKNLIGALLFDSGETAEATRLKRTARRRYTRRKNRICYLQEIF | | | | |
| | | SNEMAKVDDSFFHRLEESFLVEEDKKHERHPIFGNIVDEVAY | | | | |
| | | HEKYPTIYHLRKKLVDSTDKADLRLIYLALAHMIKFRGHFLIE | | | | |
| | | GDLNPDNSDVDKLFIQLVQTYNQLFEENPINASGVDAKAILSA | | | | |
| | | RLSKSRRLENLIAQLPGEKKNGLFGNLIALSLGLTPNFKSNFDL | | | | |
| | | AEDAKLQLSKDTYDDDLDNLLAQIGDQYADLFLAAKNLSDA | | | | |
| | | ILLSDILRVNTEITKAPLSASMIKRYDEHHQDLTLLKALVRQQ | | | | |
| | | LPEKYKEIFFDQSKNGYAGYIDGGASQEEFYKFIKPILEKMDG | | | | |
| | | TEELLVKLNREDLLRKQRTFDNGSIPHQIHLGELHAILRRQED | | | | |
| | | FYPFLKDNREKIEKILTFRIPYYVGPLARGNSRFAWMTRKSEE | | | | |
| | | TITPWNFEEVVDKGASAQSFIERMTNFDKNLPNEKVLPKHSLL | | | | |
| | | YEYFTVYNELTKVKYVTEGMRKPAFLSGEQKKAIVDLLFKTN | | | | |
| | | RKVTVKQLKEDYFKKIECFDSVEISGVEDRFNASLGTYHDLL | | | | |
| | | KIIKDKDFLDNEENEDILEDIVLTLTLFEDREMIEERLKTYAHL | | | | |
| | | FDDKVMKQLKRRRYTGWGRLSRKLINGIRDKQSGKTILDFLK | | | | |
| | | SDGFANRNFMQLIHDDSLTFKEDIQKAQVSGQGDSLHEHIAN | | | | |
| | | LAGSPAIKKGILQTVKVVDELVKVMGRHKPENIVIEMARENQ | | | | |
| | | TTQKGQKNSRERMKRIEEGIKELGSQILKEHPVENTQLQNEKL | | | | |
| | | YLYYLQNGRDMYVDQELDINRLSDYDVDHIVPQSFLKDDSID | | | | |
| | | NKVLTRSDKNRGKSDNVPSEEVVKKMKNYWRQLLNAKLITQ | | | | |
| | | RKFDNLTKAERGGLSELDKAGFIKRQLVETRQITKHVAQILDS | | | | |
| | | RMNTKYDENDKLIREVKVITLKSKLVSDFRKDFQFYKVREIN | | | | |
| | | NYHHAHDAYLNAVVGTALIKKYPKLESEFVYGDYKVYDVR | | | | |
| | | KMIAKSEQEIGKATAKYFFYSNIMNFFKTEITLANGEIRKRPLI | | | | |
| | | ETNGETGEIVWDKGRDFATVRKVLSMPQVNIVKKTEVQTGG | | | | |
| | | FSKESILPKRNSDKLIARKKDWDPKKYGGFVSPTVAYSVLVV | | | | |
| | | AKVEKGKSKKLKSVKELLGITIMERSSFEKNPIDFLEAKGYKE | | | | |
| | | VKKDLIIKLPKYSLFELENGRKRMLASARELQKGNELALPSK | | | | |
| | | YVNFLYLASHYEKLKGSPEDNEQKQLFVEQHKHYLDEIIEQIS | | | | |
| | | EFSKRVILADANLDKVLSAYNKHRDKPIREQAENIIHLFTLTN | | | | |
| | | LGAPAAFKYFDTTIDRKEYRSTKEVLDATLIHQSITGLYETRID | | | | |
| | | LSQLGGD | | | | |
| SpyCas9- | Streptococcus | MDKKYSIGLDIGTNSVGWAVITDEYKVPSKKFKVLGNTDRHS | 9,032 | N863A | H840A | D10A |
| xCas | pyogenes | IKKNLIGALLFDSGETAEATRLKRTARRRYTRRKNRICYLQEIF | | | | |
| | | SNEMAKVDDSFFHRLEESFLVEEDKKHERHPIFGNIVDEVAY | | | | |
| | | HEKYPTIYHLRKKLVDSTDKADLRLIYLALAHMIKFRGHFLIE | | | | |
| | | GDLNPDNSDVDKLFIQLVQTYNQLFEENPINASGVDAKAILSA | | | | |
| | | RLSKSRRLENLIAQLPGEKKNGLFGNLIALSLGLTPNFKSNFDL | | | | |
| | | AEDTKLQLSKDTYDDDLDNLLAQIGDQYADLFLAAKNLSDAI | | | | |
| | | LLSDILRVNTEITKAPLSASMIKLYDEHHQDLTLLKALVRQQL | | | | |
| | | PEKYKEIFFDQSKNGYAGYIDGGASQEEFYKFIKPILEKMDGT | | | | |
| | | EELLVKLNREDLLRKQRTFDNGIIPHQIHLGELHAILRRQEDFY | | | | |
| | | PFLKDNREKIEKILTFRIPYYVGPLARGNSRFAWMTRKSEETIT | | | | |
| | | PWNFEKVVDKGASAQSFIERMTNFDKNLPNEKVLPKHSLLYE | | | | |
| | | YFTVYNELTKVKYVTEGMRKPAFLSGDQKKAIVDLLFKTNR | | | | |
| | | KVTVKQLKEDYFKKIECFDSVEISGVEDRFNASLGTYHDLLKI | | | | |
| | | IKDKDFLDNEENEDILEDIVLTLTLFEDREMIEERLKTYAHLFD | | | | |
| | | DKVMKQLKRRRYTGWGRLSRKLINGIRDKQSGKTILDFLKSD | | | | |
| | | GFANRNFIQLIHDDSLTFKEDIQKAQVSGQGDSLHEHIANLAG | | | | |
| | | SPAIKKGILQTVKVVDELVKVMGRHKPENIVIEMARENQTTQ | | | | |
| | | KGQKNSRERMKRIEEGIKELGSQILKEHPVENTQLQNEKLYL | | | | |
| | | YYLQNGRDMYVDQELDINRLSDYDVDHIVPQSFLKDDSIDNK | | | | |
| | | VLTRSDKNRGKSDNVPSEEVVKKMKNYWRQLLNAKLITQRK | | | | |
| | | FDNLTKAERGGLSELDKAGFIKRQLVETRQITKHVAQILDSR | | | | |
| | | MNTKYDENDKLIREVKVITLKSKLVSDFRKDFQFYKVREINN | | | | |
| | | YHHAHDAYLNAVVGTALIKKYPKLESEFVYGDYKVYDVRK | | | | |
| | | MIAKSEQEIGKATAKYFFYSNIMNFFKTEITLANGEIRKRPLIE | | | | |
| | | TNGETGEIVWDKGRDFATVRKVLSMPQVNIVKKTEVQTGGF | | | | |
| | | SKESILPKRNSDKLIARKKDWDPKKYGGFDSPTVAYSVLVVA | | | | |
| | | KVEKGKSKKLKSVKELLGITIMERSSFEKNPIDFLEAKGYKEV | | | | |
| | | KKDLIIKLPKYSLFELENGRKRMLASAGVLQKGNELALPSKY | | | | |
| | | VNFLYLASHYEKLKGSPEDNEQKQLFVEQHKHYLDEIIEQISE | | | | |
| | | FSKRVILADANLDKVLSAYNKHRDKPIREQAENIIHLFTLTNL | | | | |
| | | GAPAAFKYFDTTIDRKRYTSTKEVLDATLIHQSITGLYETRIDL | | | | |
| | | SQLGGD | | | | |
| SpyCas9- | Streptococcus | MDKKYSIGLDIGTNSVGWAVITDEYKVPSKKFKVLGNTDRHS | 9,033 | N863A | H840A | D10A |
| xCas-NG | pyogenes | IKKNLIGALLFDSGETAEATRLKRTARRRYTRRKNRICYLQEIF | | | | |
| | | SNEMAKVDDSFFHRLEESFLVEEDKKHERHPIFGNIVDEVAY | | | | |
| | | HEKYPTIYHLRKKLVDSTDKADLRLIYLALAHMIKFRGHFLIE | | | | |
| | | GDLNPDNSDVDKLFIQLVQTYNQLFEENPINASGVDAKAILSA | | | | |
| | | RLSKSRRLENLIAQLPGEKKNGLFGNLIALSLGLTPNFKSNFDL | | | | |
| | | AEDTKLQLSKDTYDDDLDNLLAQIGDQYADLFLAAKNLSDAI | | | | |
| | | LLSDILRVNTEITKAPLSASMIKLYDEHHQDLTLLKALVRQQL | | | | |
| | | PEKYKEIFFDQSKNGYAGYIDGGASQEEFYKFIKPILEKMDGT | | | | |
| | | EELLVKLNREDLLRKQRTFDNGIIPHQIHLGELHAILRRQEDFY | | | | |
| | | PFLKDNREKIEKILTFRIPYYVGPLARGNSRFAWMTRKSEETIT | | | | |
| | | PWNFEKVVDKGASAQSFIERMTNFDKNLPNEKVLPKHSLLYE | | | | |
| | | YFTVYNELTKVKYVTEGMRKPAFLSGDQKKAIVDLLFKTNR | | | | |
| | | KVTVKQLKEDYFKKIECFDSVEISGVEDRFNASLGTYHDLLKI | | | | |
| | | IKDKDFLDNEENEDILEDIVLTLTLFEDREMIEERLKTYAHLFD | | | | |
| | | DKVMKQLKRRRYTGWGRLSRKLINGIRDKQSGKTILDFLKSD | | | | |
| | | GFANRNFIQLIHDDSLTFKEDIQKAQVSGQGDSLHEHIANLAG | | | | |
| | | SPAIKKGILQTVKVVDELVKVMGRHKPENIVIEMARENQTTQ | | | | |
| | | KGQKNSRERMKRIEEGIKELGSQILKEHPVENTQLQNEKLYL | | | | |
| | | YYLQNGRDMYVDQELDINRLSDYDVDHIVPQSFLKDDSIDNK | | | | |
| | | VLTRSDKNRGKSDNVPSEEVVKKMKNYWRQLLNAKLITQRK | | | | |
| | | FDNLTKAERGGLSELDKAGFIKRQLVETRQITKHVAQILDSR | | | | |
| | | MNTKYDENDKLIREVKVITLKSKLVSDFRKDFQFYKVREINN | | | | |
| | | YHHAHDAYLNAVVGTALIKKYPKLESEFVYGDYKVYDVRK | | | | |
| | | MIAKSEQEIGKATAKYFFYSNIMNFFKTEITLANGEIRKRPLIE | | | | |
| | | TNGETGEIVWDKGRDFATVRKVLSMPQVNIVKKTEVQTGGF | | | | |
| | | SKESIRPKRNSDKLIARKKDWDPKKYGGFVSPTVAYSVLVVA | | | | |
| | | KVEKGKSKKLKSVKELLGITIMERSSFEKNPIDFLEAKGYKEV | | | | |
| | | KKDLIIKLPKYSLFELENGRKRMLASARFLQKGNELALPSKYV | | | | |
| | | NFLYLASHYEKLKGSPEDNEQKQLFVEQHKHYLDEIIEQISEF | | | | |
| | | SKRVILADANLDKVLSAYNKHRDKPIREQAENIIHLFTLTNLG | | | | |
| | | APRAFKYFDTTIDRKVYRSTKEVLDATLIHQSITGLYETRIDLS | | | | |
| | | QLGGD | | | | |
| St1Cas9- | Streptococcus | MSDLVLGLDIGIGSVGVGILNKVTGEIIHKNSRIFPAAQAENNL | 9,034 | N622A | H599A | D9A |
| CNRZ1066 | thermophilus | VRRTNRQGRRLARRKKHRRVRLNRLFEESGLITDFTKISINLN | | | | |
| | | PYQLRVKGLTDELSNEELFIALKNMVKHRGISYLDDASDDGN | | | | |
| | | SSVGDYAQIVKENSKQLETKTPGQIQLERYQTYGQLRGDFTV | | | | |
| | | EKDGKKHRLINVFPTSAYRSEALRILQTQQEFNPQITDEFINRY | | | | |
| | | LEILTGKRKYYHGPGNEKSRTDYGRYRTSGETLDNIFGILIGK | | | | |
| | | CTFYPDEFRAAKASYTAQEFNLLNDLNNLTVPTETKKLSKEQ | | | | |
| | | KNQIINYVKNEKAMGPAKLFKYIAKLLSCDVADIKGYRIDKS | | | | |
| | | GKAEIHTFEAYRKMKTLETLDIEQMDRETLDKLAYVLTLNTE | | | | |
| | | REGIQEALEHEFADGSFSQKQVDELVQFRKANSSIFGKGWHN | | | | |
| | | FSVKLMMELIPELYETSEEQMTILTRLGKQKTTSSSNKTKYID | | | | |
| | | EKLLTEEIYNPVVAKSVRQAIKIVNAAIKEYGDFDNIVIEMAR | | | | |
| | | ETNEDDEKKAIQKIQKANKDEKDAAMLKAANQYNGKAELP | | | | |
| | | HSVFHGHKQLATKIRLWHQQGERCLYTGKTISIHDLINNSNQF | | | | |
| | | EVDHILPLSITFDDSLANKVLVYATANQEKGQRTPYQALDSM | | | | |
| | | DDAWSFRELKAFVRESKTLSNKKKEYLLTEEDISKFDVRKKFI | | | | |
| | | ERNLVDTRYASRVVLNALQEHFRAHKIDTKVSVVRGQFTSQL | | | | |
| | | RRHWGIEKTRDTYHHHAVDALIIAASSQLNLWKKQKNTLVS | | | | |
| | | YSEEQLLDIETGELISDDEYKESVFKAPYQHFVDTLKSKEFED | | | | |
| | | SILFSYQVDSKFNRKISDATIYATRQAKVGKDKKDETYVLGKI | | | | |
| | | KDIYTQDGYDAFMKIYKKDKSKFLMYRHDPQTFEKVIEPILE | | | | |
| | | NYPNKQMNEKGKEVPCNPFLKYKEEHGYIRKYSKKGNGPEI | | | | |
| | | KSLKYYDSKLLGNPIDITPENSKNKVVLQSLKPWRTDVYFNK | | | | |
| | | ATGKYEILGLKYADLQFEKGTGTYKISQEKYNDIKKKEGVDS | | | | |
| | | DSEFKFTLYKNDLLLVKDTETKEQQLFRFLSRTLPKQKHYVE | | | | |
| | | LKPYDKQKFEGGEALIKVLGNVANGGQCIKGLAKSNISIYKV | | | | |
| | | RTDVLGNQHIIKNEGDKPKLDF | | | | |
| St1Cas9- | Streptococcus | MSDLVLGLDIGIGSVGVGILNKVTGEIIHKNSRIFPAAQAENNL | 9,035 | N622A | H599A | D9A |
| LMG1831 | thermophilus | VRRTNRQGRRLARRKKHRRVRLNRLFEESGLITDFTKISINLN | | | | |
| | | PYQLRVKGLTDELSNEELFIALKNMVKHRGISYLDDASDDGN | | | | |
| | | SSVGDYAQIVKENSKQLETKTPGQIQLERYQTYGQLRGDFTV | | | | |
| | | EKDGKKHRLINVFPTSAYRSEALRILQTQQEFNPQITDEFINRY | | | | |
| | | LEILTGKRKYYHGPGNEKSRTDYGRYRTSGETLDNIFGILIGK | | | | |
| | | CTFYPDEFRAAKASYTAQEFNLLNDLNNLTVPTETKKLSKEQ | | | | |
| | | KNQIINYVKNEKAMGPAKLFKYIAKLLSCDVADIKGYRIDKS | | | | |
| | | GKAEIHTFEAYRKMKTLETLDIEQMDRETLDKLAYVLTLNTE | | | | |
| | | REGIQEALEHEFADGSFSQKQVDELVQFRKANSSIFGKGWHN | | | | |
| | | FSVKLMMELIPELYETSEEQMTILTRLGKQKTTSSSNKTKYID | | | | |
| | | EKLLTEEIYNPVVAKSVRQAIKIVNAAIKEYGDFDNIVIEMAR | | | | |
| | | ETNEDDEKKAIQKIQKANKDEKDAAMLKAANQYNGKAELP | | | | |
| | | HSVFHGHKQLATKIRLWHQQGERCLYTGKTISIHDLINNSNQF | | | | |
| | | EVDHILPLSITFDDSLANKVLVYATANQEKGQRTPYQALDSM | | | | |
| | | DDAWSFRELKAFVRESKTLSNKKKEYLLTEEDISKFDVRKKFI | | | | |
| | | ERNLVDTRYASRVVLNALQEHFRAHKIDTKVSVVRGQFTSQL | | | | |
| | | RRHWGIEKTRDTYHHHAVDALIIAASSQLNLWKKQKNTLVS | | | | |
| | | YSEEQLLDIETGELISDDEYKESVFKAPYQHFVDTLKSKEFED | | | | |
| | | SILFSYQVDSKFNRKISDATIYATRQAKVGKDKKDETYVLGKI | | | | |
| | | KDIYTQDGYDAFMKIYKKDKSKFLMYRHDPQTFEKVIEPILE | | | | |
| | | NYPNKQMNEKGKEVPCNPFLKYKEEHGYIRKYSKKGNGPEI | | | | |
| | | KSLKYYDSKLLGNPIDITPENSKNKVVLQSLKPWRTDVYFNK | | | | |
| | | NTGKYEILGLKYADLQFEKKTGTYKISQEKYNGIMKEEGVDS | | | | |
| | | DSEFKFTLYKNDLLLVKDTETKEQQLFRFLSRTMPNVKYYVE | | | | |
| | | LKPYSKDKFEKNESLIEILGSADKSGRCIKGLGKSNISIYKVRT | | | | |
| | | DVLGNQHIIKNEGDKPKLDF | | | | |
| St1Cas9- | Streptococcus | MSDLVLGLDIGIGSVGVGILNKVTGEIIHKNSRIFPAAQAENNL | 9,036 | N622A | H599A | D9A |
| MTH17CL396 | thermophilus | VRRTNRQGRRLARRKKHRRVRLNRLFEESGLITDFTKISINLN | | | | |
| | | PYQLRVKGLTDELSNEELFIALKNMVKHRGISYLDDASDDGN | | | | |
| | | SSVGDYAQIVKENSKQLETKTPGQIQLERYQTYGQLRGDFTV | | | | |
| | | EKDGKKHRLINVFPTSAYRSEALRILQTQQEFNPQITDEFINRY | | | | |
| | | LEILTGKRKYYHGPGNEKSRTDYGRYRTSGETLDNIFGILIGK | | | | |
| | | CTFYPDEFRAAKASYTAQEFNLLNDLNNLTVPTETKKLSKEQ | | | | |
| | | KNQIINYVKNEKAMGPAKLFKYIAKLLSCDVADIKGYRIDKS | | | | |
| | | GKAEIHTFEAYRKMKTLETLDIEQMDRETLDKLAYVLTLNTE | | | | |
| | | REGIQEALEHEFADGSFSQKQVDELVQFRKANSSIFGKGWHN | | | | |
| | | FSVKLMMELIPELYETSEEQMTILTRLGKQKTTSSSNKTKYID | | | | |
| | | EKLLTEEIYNPVVAKSVRQAIKIVNAAIKEYGDFDNIVIEMAR | | | | |
| | | ETNEDDEKKAIQKIQKANKDEKDAAMLKAANQYNGKAELP | | | | |
| | | HSVFHGHKQLATKIRLWHQQGERCLYTGKTISIHDLINNSNQF | | | | |
| | | EVDHILPLSITFDDSLANKVLVYATANQEKGQRTPYQALDSM | | | | |
| | | DDAWSFRELKAFVRESKTLSNKKKEYLLTEEDISKFDVRKKFI | | | | |
| | | ERNLVDTRYASRVVLNALQEHFRAHKIDTKVSVVRGQFTSQL | | | | |
| | | RRHWGIEKTRDTYHHHAVDALIIAASSQLNLWKKQKNTLVS | | | | |
| | | YSEDQLLDIETGELISDDEYKESVFKAPYQHFVDTLKSKEFED | | | | |
| | | SILFSYQVDSKFNRKISDATIYATRQAKVGKDKADETYVLGKI | | | | |
| | | KDIYTQDGYDAFMKIYKKDKSKFLMYRHDPQTFEKVIEPILE | | | | |
| | | NYPNKQINEKGKEVPCNPFLKYKEEHGYIRKYSKKGNGPEIK | | | | |
| | | SLKYYDSKLGNHIDITPKDSNNKVVLQSLKPWRTDVYFNKNT | | | | |
| | | GKYEILGLKYSDMQFEKGTGKYSISKEQYENIKVREGVDENS | | | | |
| | | EFKFTLYKNDLLLLKDSENGEQILLRFTSRNDTSKHYVELKPY | | | | |
| | | NRQKFEGSEYLIKSLGTVAKGGQCIKGLGKSNISIYKVRTDVL | | | | |
| | | GNQHIIKNEGDKPKLDF | | | | |
| St1Cas9- | Streptococcus | MSDLVLGLDIGIGSVGVGILNKVTGEIIHKNSRIFPAAQAENNL | 9,037 | N622A | H599A | D9A |
| TH1477 | thermophilus | VRRTNRQGRRLARRKKHRRVRLNRLFEESGLITDFTKISINLN | | | | |
| | | PYQLRVKGLTDELSNEELFIALKNMVKHRGISYLDDASDDGN | | | | |
| | | SSVGDYAQIVKENSKQLETKTPGQIQLERYQTYGQLRGDFTV | | | | |
| | | EKDGKKHRLINVFPTSAYRSEALRILQTQQEFNPQITDEFINRY | | | | |
| | | LEILTGKRKYYHGPGNEKSRTDYGRYRTSGETLDNIFGILIGK | | | | |
| | | CTFYPDEFRAAKASYTAQEFNLLNDLNNLTVPTETKKLSKEQ | | | | |
| | | KNQIINYVKNEKAMGPAKLFKYIAKLLSCDVADIKGYRIDKS | | | | |
| | | GKAEIHTFEAYRKMKTLETLDIEQMDRETLDKLAYVLTLNTE | | | | |
| | | REGIQEALEHEFADGSFSQKQVDELVQFRKANSSIFGKGWHN | | | | |
| | | FSVKLMMELIPELYETSEEQMTILTRLGKQKTTSSSNKTKYID | | | | |
| | | EKLLTEEIYNPVVAKSVRQAIKIVNAAIKEYGDFDNIVIEMAR | | | | |
| | | ETNEDDEKKAIQKIQKANKDEKDAAMLKAANQYNGKAELP | | | | |
| | | HSVFHGHKQLATKIRLWHQQGERCLYTGKTISIHDLINNSNQF | | | | |
| | | EVDHILPLSITFDDSLANKVLVYATANQEKGQRTPYQALDSM | | | | |
| | | DDAWSFRELKAFVRESKTLSNKKKEYLLTEEDISKFDVRKKFI | | | | |
| | | ERNLVDTRYASRVVLNALQEHFRAHKIDTKVSVVRGQFTSQL | | | | |
| | | RRHWGIEKTRDTYHHHAVDALIIAASSQLNLWKKQKNTLVS | | | | |
| | | YSEDQLLDIETGELISDDEYKESVFKAPYQHFVDTLKSKEFED | | | | |
| | | SILFSYQVDSKFNRKISDATIYATRQAKVGKDKADETYVLGKI | | | | |
| | | KDIYTQDGYDAFMKIYKKDKSKFLMYRHDPQTFEKVIEPILE | | | | |
| | | NYPNKQINEKGKEVPCNPFLKYKEEHGYIRKYSKKGNGPEIK | | | | |
| | | SLKYYDSKLGNHIDITPKDSNNKVVLQSLKPWRTDVYFNKNT | | | | |
| | | GKYEILGLKYSDMQFEKGTGKYSISKEQYENIKVREGVDENS | | | | |
| | | EFKFTLYKNDLLLLKDSENGEQILLRFTSRNDTSKHYVELKPY | | | | |
| | | NRQKFEGSEYLIKSLGTVVKGGRCIKGLGKSNISIYKVRTDVL | | | | |
| | | GNQHIIKNEGDKPKLDF | | | | |
| SRGN3.1 | Staphylococcus | MNQKFILGLDIGITSVGYGLIDYETKNIIDAGVRLFPEANVENN | 9,038 | N585A | H562A | D10A |
| | spp. | EGRRSKRGSRRLKRRRIHRLERVKLLLTEYDLINKEQIPTSNNP | | | | |
| | | YQIRVKGLSEILSKDELAIALLHLAKRRGIHNVDVAADKEETA | | | | |
| | | SDSLSTKDQINKNAKFLESRYVCELQKERLENEGHVRGVENR | | | | |
| | | FLTKDIVREAKKIIDTQMQYYPEIDETFKEKYISLVETRREYFE | | | | |
| | | GPGQGSPFGWNGDLKKWYEMLMGHCTYFPQELRSVKYAYS | | | | |
| | | ADLFNALNDLNNLIIQRDNSEKLEYHEKYHIIENVFKQKKKPT | | | | |
| | | LKQIAKEIGVNPEDIKGYRITKSGTPEFTSFKLFHDLKKVVKD | | | | |
| | | HAILDDIDLLNQIAEILTIYQDKDSIVAELGQLEYLMSEADKQS | | | | |
| | | ISELTGYTGTHSLSLKCMNMIIDELWHSSMNQMEVFTYLNMR | | | | |
| | | PKKYELKGYQRIPTDMIDDAILSPVVKRTFIQSINVINKVIEKY | | | | |
| | | GIPEDIIIELARENNSDDRKKFINNLQKKNEATRKRINEIIGQTG | | | | |
| | | NQNAKRIVEKIRLHDQQEGKCLYSLESIPLEDLLNNPNHYEVD | | | | |
| | | HIIPRSVSFDNSYHNKVLVKQSENSKKSNLTPYQYFNSGKSKL | | | | |
| | | SYNQFKQHILNLSKSQDRISKKKKEYLLEERDINKFEVQKEFI | | | | |
| | | NRNLVDTRYATRELTNYLKAYFSANNMNVKVKTINGSFTDY | | | | |
| | | LRKVWKFKKERNHGYKHHAEDALIIANADFLFKENKKLKAV | | | | |
| | | NSVLEKPEIETKQLDIQVDSEDNYSEMFIIPKQVQDIKDFRNFK | | | | |
| | | YSHRVDKKPNRQLINDTLYSTRKKDNSTYIVQTIKDIYAKDNT | | | | |
| | | TLKKQFDKSPEKFLMYQHDPRTFEKLEVIMKQYANEKNPLA | | | | |
| | | KYHEETGEYLTKYSKKNNGPIVKSLKYIGNKLGSHLDVTHQF | | | | |
| | | KSSTKKLVKLSIKNYRFDVYLTEKGYKFVTIAYLNVFKKDNY | | | | |
| | | YYIPKDKYQELKEKKKIKDTDQFIASFYKNDLIKLNGDLYKII | | | | |
| | | GVNSDDRNIIELDYYDIKYKDYCEINNIKGEPRIKKTIGKKTES | | | | |
| | | IEKFTTDVLGNLYLHSTEKAPQLIFKRGL | | | | |
| SRGN3.3 | Staphylococcus | MNQKFILGLDIGITSVGYGLIDYETKNIIDAGVRLFPEANVENN | 9,039 | N585A | H562A | D10A |
| | spp. | EGRRSKRGSRRLKRRRIHRLERVKLLLTEYDLINKEQIPTSNNP | | | | |
| | | YQIRVKGLSEILSKDELAIALLHLAKRRGIHNVDVAADKEETA | | | | |
| | | SDSLSTKDQINKNAKFLESRYVCELQKERLENEGHVRGVENR | | | | |
| | | FLTKDIVREAKKIIDTQMQYYPEIDETFKEKYISLVETRREYFE | | | | |
| | | GPGQGSPFGWNGDLKKWYEMLMGHCTYFPQELRSVKYAYS | | | | |
| | | ADLFNALNDLNNLIIQRDNSEKLEYHEKYHIIENVFKQKKKPT | | | | |
| | | LKQIAKEIGVNPEDIKGYRITKSGTPEFTSFKLFHDLKKVVKD | | | | |
| | | HAILDDIDLLNQIAEILTIYQDKDSIVAELGQLEYLMSEADKQS | | | | |
| | | ISELTGYTGTHSLSLKCMNMIIDELWHSSMNQMEVFTYLNMR | | | | |
| | | PKKYELKGYQRIPTDMIDDAILSPVVKRTFIQSINVINKVIEKY | | | | |
| | | GIPEDIIIELARENNSDDRKKFINNLQKKNEATRKRINEIIGQTG | | | | |
| | | NQNAKRIVEKIRLHDQQEGKCLYSLESIPLEDLLNNPNHYEVD | | | | |
| | | HIIPRSVSFDNSYHNKVLVKQSENSKKSNLTPYQYFNSGKSKL | | | | |
| | | SYNQFKQHILNLSKSQDRISKKKKEYLLEERDINKFEVQKEFI | | | | |
| | | NRNLVDTRYATRELTSYLKAYFSANNMDVKVKTINGSFTNH | | | | |
| | | LRKVWRFDKYRNHGYKHHAEDALIIANADFLFKENKKLQNT | | | | |
| | | NKILEKPTIENNTKKVTVEKEEDYNNVFETPKLVEDIKQYRDY | | | | |
| | | KFSHRVDKKPNRQLINDTLYSTRMKDEHDYIVQTITDIYGKD | | | | |
| | | NTNLKKQFNKNPEKFLMYQNDPKTFEKLSIIMKQYSDEKNPL | | | | |
| | | AKYYEETGEYLTKYSKKNNGPIVKKIKLLGNKVGNHLDVTN | | | | |
| | | KYENSTKKLVKLSIKNYRFDVYLTEKGYKFVTIAYLNVFKKD | | | | |
| | | NYYYIPKDKYQELKEKKKIKDTDQFIASFYKNDLIKLNGDLY | | | | |
| | | KIIGVNSDDRNIIELDYYDIKYKDYCEINNIKGEPRIKKTIGKKT | | | | |
| | | ESIEKFTTDVLGNLYLHSTEKAPQLIFKRGL | | | | |

[0615] In some embodiments, a Cas protein requires a protospacer adjacent motif (PAM) to be present in or adjacent to a target DNA sequence for the Cas protein to bind and/or function. In some embodiments, the PAM is or comprises, from 5′ to 3′, NGG, YG, NNGRRT, NNNRRT, NGA, TYCV, TATV, NTTN, or NNNGATT, where N stands for any nucleotide, Y stands for C or T, R stands for A or G, and V stands for A or C or G. In some embodiments, a Cas protein is a protein listed in Table 7 or 8. In some embodiments, a Cas protein comprises one or more mutations altering its PAM. In some embodiments, a Cas protein comprises E1369R, E1449H, and R1556A mutations or analogous substitutions to the amino acids corresponding to said positions. In some embodiments, a Cas protein comprises E782K, N968K, and R1015H mutations or analogous substitutions to the amino acids corresponding to said positions. In some embodiments, a Cas protein comprises D1135V, R1335Q, and T1337R mutations or analogous substitutions to the amino acids corresponding to said positions. In some embodiments, a Cas protein comprises S542R and K607R mutations or analogous substitutions to the amino acids corresponding to said positions. In some embodiments, a Cas protein comprises S542R, K548V, and N552R mutations or analogous substitutions to the amino acids corresponding to said positions. Exemplary advances in the engineering of Cas enzymes to recognize altered PAM sequences are reviewed in Collias et al Nature Communications 12:555 (2021), incorporated herein by reference in its entirety.

[0616] In some embodiments, the Cas protein is catalytically active and cuts one or both strands of the target DNA site. In some embodiments, cutting the target DNA site is followed by formation of an alteration, e.g., an insertion or deletion, e.g., by the cellular repair machinery.

[0617] In some embodiments, the Cas protein is modified to deactivate or partially deactivate the nuclease, e.g., nuclease-deficient Cas9. Whereas wild-type Cas9 generates double-strand breaks (DSBs) at specific DNA sequences targeted by a gRNA, a number of CRISPR endonucleases having modified functionalities are available, for example: a “nickase” version of Cas9 that has been partially deactivated generates only a single-strand break; a catalytically inactive Cas9 (“dCas9”) does not cut target DNA. In some embodiments, dCas9 binding to a DNA sequence may interfere with transcription at that site by steric hindrance. In some embodiments, dCas9 binding to an anchor sequence may interfere with (e.g., decrease or prevent) genomic complex (e.g., ASMC) formation and/or maintenance. In some embodiments, a DNA-binding domain comprises a catalytically inactive Cas9, e.g., dCas9. Many catalytically inactive Cas9 proteins are known in the art. In some embodiments, dCas9 comprises mutations in each endonuclease domain of the Cas protein, e.g., D10A and H840A or N863A mutations. In some embodiments, a catalytically inactive or partially inactive CRISPR/Cas domain comprises a Cas protein comprising one or more mutations, e.g., one or more of the mutations listed in Table 7. In some embodiments, a Cas protein described on a given row of Table 7 comprises one, two, three, or all of the mutations listed in the same row of Table 7. In some embodiments, a Cas protein, e.g., not described in Table 7, comprises one, two, three, or all of the mutations listed in a row of Table 7 or a corresponding mutation at a corresponding site in that Cas protein.

[0618] In some embodiments, a catalytically inactive, e.g., dCas9, or partially deactivated Cas9 protein comprises a D11 mutation (e.g., D11A mutation) or an analogous substitution to the amino acid corresponding to said position. In some embodiments, a catalytically inactive Cas9 protein, e.g., dCas9, or partially deactivated Cas9 protein comprises a H969 mutation (e.g., H969A mutation) or an analogous substitution to the amino acid corresponding to said position. In some embodiments, a catalytically inactive Cas9 protein, e.g., dCas9, or partially deactivated Cas9 protein comprises a N995 mutation (e.g., N995A mutation) or an analogous substitution to the amino acid corresponding to said position. In some embodiments, a catalytically inactive Cas9 protein, e.g., dCas9, comprises mutations at one, two, or three of positions D11, H969, and N995 (e.g., D11A, H969A, and N995A mutations) or analogous substitutions to the amino acids corresponding to said positions.

[0619] In some embodiments, a catalytically inactive Cas9 protein, e.g., dCas9, or partially deactivated Cas9 protein comprises a D10 mutation (e.g., a D10A mutation) or an analogous substitution to the amino acid corresponding to said position. In some embodiments, a catalytically inactive Cas9 protein, e.g., dCas9, or partially deactivated Cas9 protein comprises a H557 mutation (e.g., a H557A mutation) or an analogous substitution to the amino acid corresponding to said position. In some embodiments, a catalytically inactive Cas9 protein, e.g., dCas9, comprises a D10 mutation (e.g., a D10A mutation) and a H557 mutation (e.g., a H557A mutation) or analogous substitutions to the amino acids corresponding to said positions.

[0620] In some embodiments, a catalytically inactive Cas9 protein, e.g., dCas9, or partially deactivated Cas9 protein comprises a D839 mutation (e.g., a D839A mutation) or an analogous substitution to the amino acid corresponding to said position. In some embodiments, a catalytically inactive Cas9 protein, e.g., dCas9, or partially deactivated Cas9 protein comprises a H840 mutation (e.g., a H840A mutation) or an analogous substitution to the amino acid corresponding to said position. In some embodiments, a catalytically inactive Cas9 protein, e.g., dCas9, or partially deactivated Cas9 protein comprises a N863 mutation (e.g., a N863A mutation) or an analogous substitution to the amino acid corresponding to said position. In some embodiments, a catalytically inactive Cas9 protein, e.g., dCas9, comprises a D10 mutation (e.g., D10A), a D839 mutation (e.g., D839A), a H840 mutation (e.g., H840A), and a N863 mutation (e.g., N863A) or analogous substitutions to the amino acids corresponding to said positions.

[0621] In some embodiments, a catalytically inactive Cas9 protein, e.g., dCas9, or partially deactivated Cas9 protein comprises an E993 mutation (e.g., a E993A mutation) or an analogous substitution to the amino acid corresponding to said position.

[0622] In some embodiments, a catalytically inactive Cas9 protein, e.g., dCas9, or partially deactivated Cas9 protein comprises a D917 mutation (e.g., a D917A mutation) or an analogous substitution to the amino acid corresponding to said position. In some embodiments, a catalytically inactive Cas9 protein, e.g., dCas9, or partially deactivated Cas9 protein comprises a a E1006 mutation (e.g., a E1006A mutation) or an analogous substitution to the amino acid corresponding to said position. In some embodiments, a catalytically inactive Cas9 protein, e.g., dCas9, or partially deactivated Cas9 protein comprises a D1255 mutation (e.g., a D1255A mutation) or an analogous substitution to the amino acid corresponding to said position. In some embodiments, a catalytically inactive Cas9 protein, e.g., dCas9, comprises a D917 mutation (e.g., D917A), a E1006 mutation (e.g., E1006A), and a D1255 mutation (e.g., D1255A) or analogous substitutions to the amino acids corresponding to said positions.

[0623] In some embodiments, a catalytically inactive Cas9 protein, e.g., dCas9, or partially deactivated Cas9 protein comprises a D16 mutation (e.g., a D16A mutation) or an analogous substitution to the amino acid corresponding to said position. In some embodiments, a catalytically inactive Cas9 protein, e.g., dCas9, or partially deactivated Cas9 protein comprises a D587 mutation (e.g., a D587A mutation) or an analogous substitution to the amino acid corresponding to said position. In some embodiments, a partially deactivated Cas domain has nickase activity. In some embodiments, a partially deactivated Cas9 domain is a Cas9 nickase domain. In some embodiments, the catalytically inactive Cas domain or dead Cas domain produces no detectable double strand break formation. In some embodiments, a catalytically inactive Cas9 protein, e.g., dCas9, or partially deactivated Cas9 protein comprises a H588 mutation (e.g., a H588A mutation) or an analogous substitution to the amino acid corresponding to said position. In some embodiments, a catalytically inactive Cas9 protein, e.g., dCas9, or partially deactivated Cas9 protein comprises a N611 mutation (e.g., a N611A mutation) or an analogous substitution to the amino acid corresponding to said position. In some embodiments, a catalytically inactive Cas9 protein, e.g., dCas9, comprises a D16 mutation (e.g., D16A), a D587 mutation (e.g., D587A), a H588 mutation (e.g., H588A), and a N611 mutation (e.g., N611A) or analogous substitutions to the amino acids corresponding to said positions.

[0624] In some embodiments, a DNA-binding domain or endonuclease domain may comprise a Cas molecule comprising or linked (e.g., covalently) to a gRNA (e.g., a template nucleic acid, e.g., template RNA, comprising a gRNA).

[0625] In some embodiments, an endonuclease domain or DNA binding domain comprises a Streptococcus pyogenes Cas9 (SpCas9) or a functional fragment or variant thereof. In some embodiments, the endonuclease domain or DNA binding domain comprises a modified SpCas9. In embodiments, the modified SpCas9 comprises a modification that alters protospacer-adjacent motif (PAM) specificity. In embodiments, the PAM has specificity for the nucleic acid sequence 5′-NGT-3′. In embodiments, the modified SpCas9 comprises one or more amino acid substitutions, e.g., at one or more of positions L1111, D1135, G1218, E1219, A1322, of R1335, e.g., selected from L1111R, D1135V, G1218R, E1219F, A1322R, R1335V. In embodiments, the modified SpCas9 comprises the amino acid substitution T1337R and one or more additional amino acid substitutions, e.g., selected from L1111, D1135L, S1136R, G1218S, E1219V, D1332A, D1332S, D1332T, D1332V, D1332L, D1332K, D1332R, R1335Q, T1337, T1337L, T1337Q, T1337I, T1337V, T1337F, T1337S, T1337N, T1337K, T1337H, T1337Q, and T1337M, or corresponding amino acid substitutions thereto. In embodiments, the modified SpCas9 comprises: (i) one or more amino acid substitutions selected from D1135L, S1136R, G1218S, E1219V, A1322R, R1335Q, and T1337; and (ii) one or more amino acid substitutions selected from L1111R, G1218R, E1219F, D1332A, D1332S, D1332T, D1332V, D1332L, D1332K, D1332R, T1337L, T1337I, T1337V, T1337F, T1337S, T1337N, T1337K, T1337R, T1337H, T1337Q, and T1337M, or corresponding amino acid substitutions thereto.

[0626] In some embodiments, the endonuclease domain or DNA binding domain comprises a Cas domain, e.g., a Cas9 domain. In embodiments, the endonuclease domain or DNA binding domain comprises a nuclease-active Cas domain, a Cas nickase (nCas) domain, or a nuclease-inactive Cas (dCas) domain. In embodiments, the endonuclease domain or DNA binding domain comprises a nuclease-active Cas9 domain, a Cas9 nickase (nCas9) domain, or a nuclease-inactive Cas9 (dCas9) domain. In some embodiments, the endonuclease domain or DNA binding domain comprises a Cas9 domain of Cas9 (e.g., dCas9 and nCas9), Cas12a/Cpf1, Cas12b/C2c1, Cas12c/C2c3, Cas12d/CasY, Cas12e/CasX, Cas12g, Cas12h, or Cas12i. In some embodiments, the endonuclease domain or DNA binding domain comprises a Cas9 (e.g., dCas9 and nCas9), Cas12a/Cpf1, Cas12b/C2c1, Cas12c/C2c3, Cas12d/CasY, Cas12e/CasX, Cas12g, Cas12h, or Cas12i. In some embodiments, the endonuclease domain or DNA binding domain comprises an S. pyogenes or an S. thermophilus Cas9, or a functional fragment thereof. In some embodiments, the endonuclease domain or DNA binding domain comprises a Cas9 sequence, e.g., as described in Chylinski, Rhun, and Charpentier (2013) RNA Biology 10:5, 726-737; incorporated herein by reference. In some embodiments, the endonuclease domain or DNA binding domain comprises the HNH nuclease subdomain and/or the RuvC1 subdomain of a Cas, e.g., Cas9, e.g., as described herein, or a variant thereof. In some embodiments, the endonuclease domain or DNA binding domain comprises Cas12a/Cpf1, Cas12b/C2c1, Cas12c/C2c3, Cas12d/CasY, Cas12e/CasX, Cas12g, Cas12h, or Cas12i. In some embodiments, the endonuclease domain or DNA binding domain comprises a Cas polypeptide (e.g., enzyme), or a functional fragment thereof. In embodiments, the Cas polypeptide (e.g., enzyme) is selected from Cas1, Cas1B, Cas2, Cas3, Cas4, Cas5, Cas5d, Cas5t, Cas5h, Cas5a, Cas6, Cas7, Cas8, Cas8a, Cas8b, Cas8c, Cas9 (e.g., Csn1 or Csx12), Cas10, Cas10d, Cas12a/Cpf1, Cas12b/C2c1, Cas12c/C2c3, Cas12d/CasY, Cas12e/CasX, Cas12g, Cas12h, Cas12i, Csy1, Csy2, Csy3, Csy4, Cse1, Cse2, Cse3, Cse4, Cse5e, Csc1, Csc2, Csa5, Csn1, Csn2, Csm1, Csm2, Csm3, Csm4, Csm5, Csm6, Cmr1, Cmr3, Cmr4, Cmr5, Cmr6, Csb1, Csb2, Csb3, Csx17, Csx14, Csx10, Csx16, CsaX, Csx3, Csx1, Csx1S, Csx11, Csf1, Csf2, CsO, Csf4, Csd1, Csd2, Cst1, Cst2, Csh1, Csh2, Csa1, Csa2, Csa3, Csa4, Csa5, Type II Cas effector proteins, Type V Cas effector proteins, Type VI Cas effector proteins, CARF, DinG, Cpf1, Cas12b/C2c1, Cas12c/C2c3, Cas12b/C2c1, Cas12c/C2c3, SpCas9(K855A), eSpCas9(1.1), SpCas9-HF1, hyper accurate Cas9 variant (HypaCas9), homologues thereof, modified or engineered versions thereof, and/or functional fragments thereof. In embodiments, the Cas9 comprises one or more substitutions, e.g., selected from H840A, D10A, P475A, W476A, N477A, D1125A, W1126A, and D1127A. In embodiments, the Cas9 comprises one or more mutations at positions selected from: D10, G12, G17, E762, H840, N854, N863, H982, H983, A984, D986, and/or A987, e.g., one or more substitutions selected from D10A, G12A, G17A, E762A, H840A, N854A, N863A, H982A, H983A, A984A, and/or D986A. In some embodiments, the endonuclease domain or DNA binding domain comprises a Cas (e.g., Cas9) sequence from Corynebacterium ulcerans, Corynebacterium diphtheria, Spiroplasma syrphidicola, Prevotella intermedia, Spiroplasma taiwanense, Streptococcus iniae, Belliella baltica, Psychroflexus torquis, Streptococcus thermophilus, Listeria innocua, Campylobacter jejuni, Neisseria meningitidis, Streptococcus pyogenes, or Staphylococcus aureus, or a fragment or variant thereof.

[0627] In some embodiments, the endonuclease domain or DNA binding domain comprises a Cpf1 domain, e.g., comprising one or more substitutions, e.g., at position D917, E1006A, D1255 or any combination thereof, e.g., selected from D917A, E1006A, D1255A, D917A/E1006A, D917A/D1255A, E1006A/D1255A, and D917A/E1006A/D1255A.

[0628] In some embodiments, the endonuclease domain or DNA binding domain comprises spCas9, spCas9-VRQR, spCas9-VRER, xCas9 (sp), saCas9, saCas9-KKH, spCas9-MQKSER, spCas9-LRKIQK, or spCas9-LRVSQL.

[0629] In some embodiments, a heterologous gene modifying polypeptide has an endonuclease domain comprising a Cas9 nickase, e.g., Cas9 H840A. In embodiments, the Cas9 H840A has the following amino acid sequence:

Cas9 nickase (H840A):
(SEQ ID NO: 11,001)
DKKYSIGLDIGTNSVGWAVITDEYKVPSKKFKVLGNTDRHSIKKNLIGALLFDSGETAEA
TRLKRTARRRYTRRKNRICYLQEIFSNEMAKVDDSFFHRLEESFLVEEDKKHERHPIFGN
IVDEVAYHEKYPTIYHLRKKLVDSTDKADLRLIYLALAHMIKFRGHFLIEGDLNPDNSDV
DKLFIQLVQTYNQLFEENPINASGVDAKAILSARLSKSRRLENLIAQLPGEKKNGLFGNLI
ALSLGLTPNFKSNFDLAEDAKLQLSKDTYDDDLDNLLAQIGDQYADLFLAAKNLSDAIL
LSDILRVNTEITKAPLSASMIKRYDEHHQDLTLLKALVRQQLPEKYKEIFFDQSKNGYAG
YIDGGASQEEFYKFIKPILEKMDGTEELLVKLNREDLLRKQRTFDNGSIPHQIHLGELHAI
LRRQEDFYPFLKDNREKIEKILTFRIPYYVGPLARGNSRFAWMTRKSEETITPWNFEEVV
DKGASAQSFIERMTNFDKNLPNEKVLPKHSLLYEYFTVYNELTKVKYVTEGMRKPAFLS
GEQKKAIVDLLFKTNRKVTVKQLKEDYFKKIECFDSVEISGVEDRFNASLGTYHDLLKII
KDKDFLDNEENEDILEDIVLTLTLFEDREMIEERLKTYAHLFDDKVMKQLKRRRYTGWG
RLSRKLINGIRDKQSGKTILDFLKSDGFANRNFMQLIHDDSLTFKEDIQKAQVSGQGDSL
HEHIANLAGSPAIKKGILQTVKVVDELVKVMGRHKPENIVIEMARENQTTQKGQKNSRE
RMKRIEEGIKELGSQILKEHPVENTQLQNEKLYLYYLQNGRDMYVDQELDINRLSDYDV
DAIVPQSFLKDDSIDNKVLTRSDKNRGKSDNVPSEEVVKKMKNYWRQLLNAKLITQRK
FDNLTKAERGGLSELDKAGFIKRQLVETRQITKHVAQILDSRMNTKYDENDKLIREVKVI
TLKSKLVSDFRKDFQFYKVREINNYHHAHDAYLNAVVGTALIKKYPKLESEFVYGDYK
VYDVRKMIAKSEQEIGKATAKYFFYSNIMNFFKTEITLANGEIRKRPLIETNGETGEIVWD
KGRDFATVRKVLSMPQVNIVKKTEVQTGGFSKESILPKRNSDKLIARKKDWDPKKYGG
FDSPTVAYSVLVVAKVEKGKSKKLKSVKELLGITIMERSSFEKNPIDFLEAKGYKEVKK
DLIIKLPKYSLFELENGRKRMLASAGELQKGNELALPSKYVNFLYLASHYEKLKGSPED
NEQKQLFVEQHKHYLDEIIEQISEFSKRVILADANLDKVLSAYNKHRDKPIREQAENIIHL
FTLTNLGAPAAFKYFDTTIDRKRYTSTKEVLDATLIHQSITGLYETRIDLSQLGGD

[0630] In some embodiments, a heterologous gene modifying polypeptide comprises a dCas9 sequence comprising a D10A and/or H840A mutation, e.g., the following sequence:

(SEQ ID NO: 5007)
SMDKKYSIGLAIGTNSVGWAVITDDYKVPSKKFKVLGNTDRHSIKKNLIGALLFDSGET
AEATRLKRTARRRYTRRKNRICYLQEIFSNEMAKVDDSFFHRLEESFLVEEDKKHERHPI
FGNIVDEVAYHEKYPTIYHLRKKLVDSTDKADLRLIYLALAHMIKFRGHFLIEGDLNPDN
SDVDKLFIQLVQTYNQLFEENPINASGVDAKAILSARLSKSRRLENLIAQLPGEKKNGLF
GNLIALSLGLTPNFKSNFDLAEDAKLQLSKDTYDDDLDNLLAQIGDQYADLFLAAKNLS
DAILLSDILRVNTEITKAPLSASMIKRYDEHHQDLTLLKALVRQQLPEKYKEIFFDQSKNG
YAGYIDGGASQEEFYKFIKPILEKMDGTEELLVKLNREDLLRKQRTFDNGSIPHQIHLGE
LHAILRRQEDFYPFLKDNREKIEKILTFRIPYYVGPLARGNSRFAWMTRKSEETITPWNFE
EVVDKGASAQSFIERMTNFDKNLPNEKVLPKHSLLYEYFTVYNELTKVKYVTEGMRKP
AFLSGEQKKAIVDLLFKTNRKVTVKQLKEDYFKKIECFDSVEISGVEDRFNASLGTYHDL
LKIIKDKDFLDNEENEDILEDIVLTLTLFEDREMIEERLKTYAHLFDDKVMKQLKRRRYT
GWGRLSRKLINGIRDKQSGKTILDFLKSDGFANRNFMQLIHDDSLTFKEDIQKAQVSGQ
GDSLHEHIANLAGSPAIKKGILQTVKVVDELVKVMGRHKPENIVIEMARENQTTQKGQK
NSRERMKRIEEGIKELGSQILKEHPVENTQLQNEKLYLYYLQNGRDMYVDQELDINRLS
DYDVDAIVPQSFLKDDSIDNKVLTRSDKNRGKSDNVPSEEVVKKMKNYWRQLLNAKLI
TQRKFDNLTKAERGGLSELDKAGFIKRQLVETRQITKHVAQILDSRMNTKYDENDKLIR
EVKVITLKSKLVSDFRKDFQFYKVREINNYHHAHDAYLNAVVGTALIKKYPKLESEFVY
GDYKVYDVRKMIAKSEQEIGKATAKYFFYSNIMNFFKTEITLANGEIRKRPLIETNGETG
EIVWDKGRDFATVRKVLSMPQVNIVKKTEVQTGGFSKESILPKRNSDKLIARKKDWDPK
KYGGFDSPTVAYSVLVVAKVEKGKSKKLKSVKELLGITIMERSSFEKNPIDFLEAKGYK
EVKKDLIIKLPKYSLFELENGRKRMLASAGELQKGNELALPSKYVNFLYLASHYEKLKG
SPEDNEQKQLFVEQHKHYLDEIIEQISEFSKRVILADANLDKVLSAYNKHRDKPIREQAE
NIIHLFTLTNLGAPAAFKYFDTTIDRKRYTSTKEVLDATLIHQSITGLYETRIDLSQLGGD

### TAL Effectors and Zinc Finger Nucleases

[0631] In some embodiments, an endonuclease domain or DNA-binding domain comprises a TAL effector molecule. A TAL effector molecule, e.g., a TAL effector molecule that specifically binds a DNA sequence, typically comprises a plurality of TAL effector domains or fragments thereof, and optionally one or more additional portions of naturally occurring TAL effectors (e.g., N- and/or C-terminal of the plurality of TAL effector domains). Many TAL effectors are known to those of skill in the art and are commercially available, e.g., from Thermo Fisher Scientific.

[0632] Naturally occurring TALEs are natural effector proteins secreted by numerous species of bacterial pathogens including the plant pathogen Xanthomonas which modulates gene expression in host plants and facilitates bacterial colonization and survival. The specific binding of TAL effectors is based on a central repeat domain of tandemly arranged nearly identical repeats of typically 33 or 34 amino acids (the repeat-variable di-residues, RVD domain).

[0633] Members of the TAL effectors family differ mainly in the number and order of their repeats. The number of repeats typically ranges from 1.5 to 33.5 repeats and the C-terminal repeat is usually shorter in length (e.g., about 20 amino acids) and is generally referred to as a “half-repeat.” Each repeat of the TAL effector generally features a one-repeat-to-one-base-pair correlation with different repeat types exhibiting different base-pair specificity (one repeat recognizes one base-pair on the target gene sequence). Generally, the smaller the number of repeats, the weaker the protein-DNA interactions. A number of 6.5 repeats has been shown to be sufficient to activate transcription of a reporter gene (Scholze et al., 2010).

[0634] Repeat to repeat variations occur predominantly at amino acid positions 12 and 13, which have therefore been termed “hypervariable” and which are responsible for the specificity of the interaction with the target DNA promoter sequence, as shown in Table 9 listing exemplary repeat variable diresidues (RVD) and their correspondence to nucleic acid base targets.

TABLE 9
RVDs and Nucleic Acid Base Specificity

| Target | Possible RVD Amino Acid Combinations | | | | | | | | | | | | |
|---|---|---|---|---|---|---|---|---|---|---|---|---|---|
| A | NI | NN | CI | HI | KI | | | | | | | | |
| G | NN | GN | SN | VN | LN | DN | QN | EN | HN | RH | NK | AN | FN |
| C | HD | RD | KD | ND | AD | | | | | | | | |
| T | NG | HG | VG | IG | EG | MG | YG | AA | EP | VA | QG | KG | RG |

[0635] Accordingly, it is possible to modify the repeats of a TAL effector to target specific DNA sequences. Further studies have shown that the RVD NK can target G. Target sites of TAL effectors also tend to include a T flanking the 5′ base targeted by the first repeat, but the exact mechanism of this recognition is not known. More than 113 TAL effector sequences are known to date. Non-limiting examples of TAL effectors from Xanthomonas include, Hax2, Hax3, Hax4, AvrXa7, AvrXa10 and AvrBs3.

[0636] Accordingly, the TAL effector domain of a TAL effector molecule described herein may be derived from a TAL effector from any bacterial species (e.g., Xanthomonas species such as the African strain of Xanthomonas oryzae pv. Oryzae (Yu et al. 2011), Xanthomonas campestris pv. raphani strain 756C and Xanthomonas oryzae pv. oryzicola strain BLS256 (Bogdanove et al. 2011). In some embodiments, the TAL effector domain comprises an RVD domain as well as flanking sequence(s) (sequences on the N-terminal and/or C-terminal side of the RVD domain) also from the naturally occurring TAL effector. It may comprise more or fewer repeats than the RVD of the naturally occurring TAL effector. The TAL effector molecule can be designed to target a given DNA sequence based on the above code and others known in the art. The number of TAL effector domains (e.g., repeats (monomers or modules)) and their specific sequence can be selected based on the desired DNA target sequence. For example, TAL effector domains, e.g., repeats, may be removed or added in order to suit a specific target sequence. In an embodiment, the TAL effector molecule of the present invention comprises between 6.5 and 33.5 TAL effector domains, e.g., repeats. In an embodiment, TAL effector molecule of the present invention comprises between 8 and 33.5 TAL effector domains, e.g., repeats, e.g., between 10 and 25 TAL effector domains, e.g., repeats, e.g., between 10 and 14 TAL effector domains, e.g., repeats.

[0637] In some embodiments, the TAL effector molecule comprises TAL effector domains that correspond to a perfect match to the DNA target sequence. In some embodiments, a mismatch between a repeat and a target base-pair on the DNA target sequence is permitted as along as it allows for the function of the polypeptide comprising the TAL effector molecule. In general, TALE binding is inversely correlated with the number of mismatches. In some embodiments, the TAL effector molecule of a polypeptide of the present invention comprises no more than 7 mismatches, 6 mismatches, 5 mismatches, 4 mismatches, 3 mismatches, 2 mismatches, or 1 mismatch, and optionally no mismatch, with the target DNA sequence. Without wishing to be bound by theory, in general the smaller the number of TAL effector domains in the TAL effector molecule, the smaller the number of mismatches will be tolerated and still allow for the function of the polypeptide comprising the TAL effector molecule. The binding affinity is thought to depend on the sum of matching repeat-DNA combinations. For example, TAL effector molecules having 25 TAL effector domains or more may be able to tolerate up to 7 mismatches.

[0638] In addition to the TAL effector domains, the TAL effector molecule of the present invention may comprise additional sequences derived from a naturally occurring TAL effector. The length of the C-terminal and/or N-terminal sequence(s) included on each side of the TAL effector domain portion of the TAL effector molecule can vary and be selected by one skilled in the art, for example based on the studies of Zhang et al. (2011). Zhang et al., have characterized a number of C-terminal and N-terminal truncation mutants in Hax3 derived TAL-effector based proteins and have identified key elements, which contribute to optimal binding to the target sequence and thus activation of transcription. Generally, it was found that transcriptional activity is inversely correlated with the length of N-terminus. Regarding the C-terminus, an important element for DNA binding residues within the first 68 amino acids of the Hax 3 sequence was identified. Accordingly, in some embodiments, the first 68 amino acids on the C-terminal side of the TAL effector domains of the naturally occurring TAL effector is included in the TAL effector molecule. Accordingly, in an embodiment, a TAL effector molecule comprises 1) one or more TAL effector domains derived from a naturally occurring TAL effector; 2) at least 70, 80, 90, 100, 110, 120, 130, 140, 150, 170, 180, 190, 200, 220, 230, 240, 250, 260, 270, 280 or more amino acids from the naturally occurring TAL effector on the N-terminal side of the TAL effector domains; and/or 3) at least 68, 80, 90, 100, 110, 120, 130, 140, 150, 170, 180, 190, 200, 220, 230, 240, 250, 260 or more amino acids from the naturally occurring TAL effector on the C-terminal side of the TAL effector domains.

[0639] In some embodiments, an endonuclease domain or DNA-binding domain is or comprises a Zn finger molecule. A Zn finger molecule comprises a Zn finger protein, e.g., a naturally occurring Zn finger protein or engineered Zn finger protein, or fragment thereof. Many Zn finger proteins are known to those of skill in the art and are commercially available, e.g., from Sigma-Aldrich.

[0640] In some embodiments, a Zn finger molecule comprises a non-naturally occurring Zn finger protein that is engineered to bind to a target DNA sequence of choice. See, for example, Beerli, et al. (2002) Nature Biotechnol. 20:135-141; Pabo, et al. (2001) Ann. Rev. Biochem. 70:313-340; Isalan, et al. (2001) Nature Biotechnol. 19:656-660; Segal, et al. (2001) Curr. Opin. Biotechnol. 12:632-637; Choo, et al. (2000) Curr. Opin. Struct. Biol. 10:411-416; U.S. Pat. Nos. 6,453,242; 6,534,261; 6,599,692; 6,503,717; 6,689,558; 7,030,215; 6,794,136; 7,067,317; 7,262,054; 7,070,934; 7,361,635; 7,253,273; and U.S. Patent Publication Nos. 2005/0064474; 2007/0218528; 2005/0267061, all incorporated herein by reference in their entireties.

[0641] An engineered Zn finger protein may have a novel binding specificity, compared to a naturally-occurring Zn finger protein. Engineering methods include, but are not limited to, rational design and various types of selection. Rational design includes, for example, using databases comprising triplet (or quadruplet) nucleotide sequences and individual Zn finger amino acid sequences, in which each triplet or quadruplet nucleotide sequence is associated with one or more amino acid sequences of zinc fingers which bind the particular triplet or quadruplet sequence. See, for example, U.S. Pat. Nos. 6,453,242 and 6,534,261, incorporated by reference herein in their entireties.

[0642] Exemplary selection methods, including phage display and two-hybrid systems, are disclosed in U.S. Pat. Nos. 5,789,538; 5,925,523; 6,007,988; 6,013,453; 6,410,248; 6,140,466; 6,200,759; and 6,242,568; as well as International Patent Publication Nos. WO 98/37186; WO 98/53057; WO 00/27878; and WO 01/88197 and GB 2,338,237. In addition, enhancement of binding specificity for zinc finger proteins has been described, for example, in International Patent Publication No. WO 02/077227.

[0643] In addition, as disclosed in these and other references, zinc finger domains and/or multi-fingered zinc finger proteins may be linked together using any suitable linker sequences, including for example, linkers of 5 or more amino acids in length. See, also, U.S. Pat. Nos. 6,479,626; 6,903,185; and 7,153,949 for exemplary linker sequences 6 or more amino acids in length. The proteins described herein may include any combination of suitable linkers between the individual zinc fingers of the protein. In addition, enhancement of binding specificity for zinc finger binding domains has been described, for example, in co-owned International Patent Publication No. WO 02/077227.

[0644] Zn finger proteins and methods for design and construction of fusion proteins (and polynucleotides encoding same) are known to those of skill in the art and described in detail in U.S. Pat. Nos. 6,140,0815; 789,538; 6,453,242; 6,534,261; 5,925,523; 6,007,988; 6,013,453; and 6,200,759; International Patent Publication Nos. WO 95/19431; WO 96/06166; WO 98/53057; WO 98/54311; WO 00/27878; WO 01/60970; WO 01/88197; WO 02/099084; WO 98/53058; WO 98/53059; WO 98/53060; WO 02/016536; and WO 03/016496.

[0645] In addition, as disclosed in these and other references, Zn finger proteins and/or multi-fingered Zn finger proteins may be linked together, e.g., as a fusion protein, using any suitable linker sequences, including for example, linkers of 5 or more amino acids in length. See, also, U.S. Pat. Nos. 6,479,626; 6,903,185; and 7,153,949 for exemplary linker sequences 6 or more amino acids in length. The Zn finger molecules described herein may include any combination of suitable linkers between the individual zinc finger proteins and/or multi-fingered Zn finger proteins of the Zn finger molecule.

[0646] In certain embodiments, the DNA-binding domain or endonuclease domain comprises a Zn finger molecule comprising an engineered zinc finger protein that binds (in a sequence-specific manner) to a target DNA sequence. In some embodiments, the Zn finger molecule comprises one Zn finger protein or fragment thereof. In other embodiments, the Zn finger molecule comprises a plurality of Zn finger proteins (or fragments thereof), e.g., 2, 3, 4, 5, 6 or more Zn finger proteins (and optionally no more than 12, 11, 10, 9, 8, 7, 6, 5, 4, 3, or 2 Zn finger proteins). In some embodiments, the Zn finger molecule comprises at least three Zn finger proteins. In some embodiments, the Zn finger molecule comprises four, five or six fingers. In some embodiments, the Zn finger molecule comprises 8, 9, 10, 11 or 12 fingers. In some embodiments, a Zn finger molecule comprising three Zn finger proteins recognizes a target DNA sequence comprising 9 or 10 nucleotides. In some embodiments, a Zn finger molecule comprising four Zn finger proteins recognizes a target DNA sequence comprising 12 to 14 nucleotides. In some embodiments, a Zn finger molecule comprising six Zn finger proteins recognizes a target DNA sequence comprising 18 to 21 nucleotides.

[0647] In some embodiments, a Zn finger molecule comprises a two-handed Zn finger protein. Two handed zinc finger proteins are those proteins in which two clusters of zinc finger proteins are separated by intervening amino acids so that the two zinc finger domains bind to two discontinuous target DNA sequences. An example of a two handed type of zinc finger binding protein is SIP1, where a cluster of four zinc finger proteins is located at the amino terminus of the protein and a cluster of three Zn finger proteins is located at the carboxyl terminus (see Remade, et al. (1999) EMBO Journal 18(18):5073-5084). Each cluster of zinc fingers in these proteins is able to bind to a unique target sequence and the spacing between the two target sequences can comprise many nucleotides.

### Exemplary Heterologous Gene Modifying Polypeptides

[0648] In some embodiments, a heterologous gene modifying polypeptide (e.g., a heterologous gene modifying polypeptide that is part of a system described herein) comprises an amino acid sequence as listed in Table T1, or an amino acid sequence having at least 70%, 75%, 80%, 85%, 90%, 95%, or 99% identity thereto. In some embodiments, a heterologous gene modifying polypeptide comprises a linker comprising a linker sequence as listed in Table T1, or an amino acid sequence having at least 70%, 75%, 80%, 85%, 90%, 95%, or 99% identity thereto. In some embodiments, a heterologous gene modifying polypeptide comprises an RT domain comprising an RT domain sequence as listed in Table T1, or an amino acid sequence having at least 70%, 75%, 80%, 85%, 90%, 95%, or 99% identity thereto. In some embodiments, a heterologous gene modifying polypeptide comprises: (i) a linker comprising a linker sequence as listed in a row of Table T1, or an amino acid sequence having at least 70%, 75%, 80%, 85%, 90%, 95%, or 99% identity thereto; and (ii) an RT domain comprising an RT domain sequence as listed in the same row of Table T1, or an amino acid sequence having at least 70%, 75%, 80%, 85%, 90%, 95%, or 99% identity thereto.

TABLE T1
Selection of exemplary heterologous gene modifying polypeptides

| SEQ ID NO: | | | |
|---|---|---|---|
| for Full | | SEQ ID | |
| Polypeptide | | NO: of | |
| Sequence | Linker Sequence | linker | RT name |
| 1372 | AEAAAKEAAAKEAAAKEAAAKALEAEAA | 15,401 | AVIRE_P03360_3mutA |
| | AKEAAAKEAAAKEAAAKA | | |
| 1197 | AEAAAKEAAAKEAAAKEAAAKALEAEAA | 15,402 | FLV_P10273_3mutA |
| | AKEAAAKEAAAKEAAAKA | | |
| 2784 | AEAAAKEAAAKEAAAKEAAAKALEAEAA | 15,403 | MLVMS_P03355_3mutA_ |
| | AKEAAAKEAAAKEAAAKA | | WS |
| 647 | AEAAAKEAAAKEAAAKEAAAKALEAEAA | 15,404 | SFV3L P27401_2mutA |
| | AKEAAAKEAAAKEAAAKA | | |

### Subsequences of Exemplary Heterologous Gene Modifying Polypeptides

[0649] In some embodiments, the heterologous gene modifying polypeptide comprises, in N-terminal to C-terminal order, one or more (e.g., 1, 2, 3, 4, 5, or all 6) of an N-terminal methionine residue, a first nuclear localization signal (NLS) (e.g., of a heterologous gene modifying polypeptide as listed in Table T1, or an amino acid sequence having at least 70%, 75%, 80%, 85%, 90%, 95%, or 99% identity thereto), a DNA binding domain (e.g., a Cas domain, e.g., a SpyCas9 domain, e.g., as listed in Table 8A, or an amino acid sequence having at least 70%, 75%, 80%, 85%, 90%, 95%, or 99% identity thereto; or a DNA binding domain of a heterologous gene modifying polypeptide as listed in Table T1, or an amino acid sequence having at least 70%, 75%, 80%, 85%, 90%, 95%, or 99% identity thereto), a linker (e.g., of a heterologous gene modifying polypeptide as listed in Table T1, or an amino acid sequence having at least 70%, 75%, 80%, 85%, 90%, 95%, or 99% identity thereto), an RT domain (e.g., of a heterologous gene modifying polypeptide as listed in Table T1, or an amino acid sequence having at least 70%, 75%, 80%, 85%, 90%, 95%, or 99% identity thereto), and a second NLS (e.g., of a heterologous gene modifying polypeptide as listed in Table T1, or an amino acid sequence having at least 70%, 75%, 80%, 85%, 90%, 95%, or 99% identity thereto). In some embodiments, the heterologous gene modifying polypeptide further comprises (e.g., C-terminal to the second NLS) a T2A sequence and/or a puromycin sequence (e.g., of a heterologous gene modifying polypeptide as listed in Table T1, or an amino acid sequence having at least 70%, 75%, 80%, 85%, 90%, 95%, or 99% identity thereto). In some embodiments, a nucleic acid encoding a heterologous gene modifying polypeptide (e.g., as described herein) encodes a T2A sequence, e.g., wherein the T2A sequence is situated between a region encoding the heterologous gene modifying polypeptide and a second region, wherein the second region optionally encodes a selectable marker, e.g., puromycin.

[0650] In certain embodiments, the first NLS comprises a first NLS sequence of a heterologous gene modifying polypeptide as listed in Table T1, or an amino acid sequence having at least 70%, 75%, 80%, 85%, 90%, 95%, or 99% identity thereto. In certain embodiments, the first NLS sequence comprises a C-myc NLS. In certain embodiments, the first NLS comprises the amino acid sequence PAAKRVKLD (SEQ ID NO: 11,095), or an amino acid sequence having at least 70%, 75%, 80%, 85%, 90%, 95%, or 99% identity thereto.

[0651] In certain embodiments, the heterologous gene modifying polypeptide further comprises a spacer sequence between the first NLS and the DNA binding domain. In certain embodiments, the spacer sequence between the first NLS and the DNA binding domain comprises 1, 2, 3, 4, 5, 6, 7, 8, 9, or 10 amino acids. In certain embodiments, the spacer sequence between the first NLS and the DNA binding domain comprises the amino acid sequence GG.

[0652] In certain embodiments, the DNA binding domain comprises a DNA binding domain of a heterologous gene modifying polypeptide as listed in Table T1, or an amino acid sequence having at least 70%, 75%, 80%, 85%, 90%, 95%, or 99% identity thereto. In certain embodiments, the DNA binding domain comprises a Cas domain (e.g., as listed in Table 8A). In certain embodiments, the DNA binding domain comprises the amino acid sequence of a SpyCas9 polypeptide (e.g., as listed in Table 8A, e.g., a Cas9 N863A polypeptide), or an amino acid sequence having at least 70%, 75%, 80%, 85%, 90%, 95%, or 99% identity thereto. In certain embodiments, the DNA binding domain comprises the amino acid sequence:

(SEQ ID NO: 11,096)
DKKYSIGLDIGTNSVGWAVITDEYKVPSKKFKVLGNTDRHSIKKNLIGALLFDSGETAEATRLK
RTARRRYTRRKNRICYLQEIFSNEMAKVDDSFFHRLEESFLVEEDKKHERHPIFGNIVDEVAYH
EKYPTIYHLRKKLVDSTDKADLRLIYLALAHMIKFRGHFLIEGDLNPDNSDVDKLFIQLVQTYN
QLFEENPINASGVDAKAILSARLSKSRRLENLIAQLPGEKKNGLFGNLIALSLGLTPNFKSNFD
LAEDAKLQLSKDTYDDDLDNLLAQIGDQYADLFLAAKNLSDAILLSDILRVNTEITKAPLSASM
IKRYDEHHQDLTLLKALVRQQLPEKYKEIFFDQSKNGYAGYIDGGASQEEFYKFIKPILEKMDG
TEELLVKLNREDLLRKQRTFDNGSIPHQIHLGELHAILRRQEDFYPFLKDNREKIEKILTFRIP
YYVGPLARGNSRFAWMTRKSEETITPWNFEEVVDKGASAQSFIERMTNFDKNLPNEKVLPKHSL
LYEYFTVYNELTKVKYVTEGMRKPAFLSGEQKKAIVDLLFKTNRKVTVKQLKEDYFKKIECFDS
VEISGVEDRFNASLGTYHDLLKIIKDKDFLDNEENEDILEDIVLTLTLFEDREMIEERLKTYAH
LFDDKVMKQLKRRRYTGWGRLSRKLINGIRDKQSGKTILDFLKSDGFANRNFMQLIHDDSLTFK
EDIQKAQVSGQGDSLHEHIANLAGSPAIKKGILQTVKVVDELVKVMGRHKPENIVIEMARENQT
TQKGQKNSRERMKRIEEGIKELGSQILKEHPVENTQLQNEKLYLYYLQNGRDMYVDQELDINRL
SDYDVDHIVPQSFLKDDSIDNKVLTRSDKARGKSDNVPSEEVVKKMKNYWRQLLNAKLITQRKF
DNLTKAERGGLSELDKAGFIKRQLVETRQITKHVAQILDSRMNTKYDENDKLIREVKVITLKSK
LVSDFRKDFQFYKVREINNYHHAHDAYLNAVVGTALIKKYPKLESEFVYGDYKVYDVRKMIAKS
EQEIGKATAKYFFYSNIMNFFKTEITLANGEIRKRPLIETNGETGEIVWDKGRDFATVRKVLSM
PQVNIVKKTEVQTGGFSKESILPKRNSDKLIARKKDWDPKKYGGFDSPTVAYSVLVVAKVEKGK
SKKLKSVKELLGITIMERSSFEKNPIDFLEAKGYKEVKKDLIIKLPKYSLFELENGRKRMLASA
GELQKGNELALPSKYVNFLYLASHYEKLKGSPEDNEQKQLFVEQHKHYLDEIIEQISEFSKRVI
LADANLDKVLSAYNKHRDKPIREQAENIIHLFTLTNLGAPAAFKYFDTTIDRKRYTSTKEVLDA
TLIHQSITGLYETRIDLSQLGGD,

or an amino acid sequence having at least 70%, 75%, 80%, 85%, 90%, 95%, or 99% identity thereto.

[0653] In certain embodiments, the heterologous gene modifying polypeptide further comprises a spacer sequence between the DNA binding domain and the linker. In certain embodiments, the spacer sequence between the DNA binding domain and the linker comprises 1, 2, 3, 4, 5, 6, 7, 8, 9, or 10 amino acids. In certain embodiments, the spacer sequence between the DNA binding domain and the linker comprises the amino acid sequence GG.

[0654] In certain embodiments, the linker comprises a linker sequence of a heterologous gene modifying polypeptide as listed in Table T1, or an amino acid sequence having at least 70%, 75%, 80%, 85%, 90%, 95%, or 99% identity thereto.

[0655] In certain embodiments, the heterologous gene modifying polypeptide further comprises a spacer sequence between the linker and the RT domain. In certain embodiments, the spacer sequence between the linker and the RT domain comprises 1, 2, 3, 4, 5, 6, 7, 8, 9, or 10 amino acids. In certain embodiments, the spacer sequence between the linker and the RT domain comprises the amino acid sequence GG.

[0656] In certain embodiments, the RT domain comprises a RT domain sequence of a heterologous gene modifying polypeptide as listed in Table T1, or an amino acid sequence having at least 70%, 75%, 80%, 85%, 90%, 95%, or 99% identity thereto. In certain embodiments, the RT domain comprises an amino acid sequence as listed in Table 6, or an amino acid sequence having at least 70%, 75%, 80%, 85%, 90%, 95%, or 99% identity thereto. In some embodiments, the RT domain has a length of about 400-500, 500-600, 600-700, 700-800, 800-900, or 900-1000 amino acids.

[0657] In certain embodiments, the heterologous gene modifying polypeptide further comprises a spacer sequence between the RT domain and the second NLS. In certain embodiments, the spacer sequence between the RT domain and the second NLS comprises 1, 2, 3, 4, 5, 6, 7, 8, 9, or 10 amino acids. In certain embodiments, the spacer sequence between the RT domain and the second NLS comprises the amino acid sequence AG.

[0658] In certain embodiments, the second NLS comprises a second NLS sequence of a heterologous gene modifying polypeptide as listed in Table T1. In certain embodiments, the second NLS sequence comprises a plurality of partial NLS sequences. In embodiments, the NLS sequence, e.g., the second NLS sequence, comprises a first partial NLS sequence, e.g., comprising the amino acid sequence KRTADGSEFE (SEQ ID NO: 11,097), or an amino acid sequence having at least 70%, 75%, 80%, 85%, 90%, 95%, or 99% identity thereto. In embodiments, the NLS sequence, e.g., the second NLS sequence, comprises a second partial NLS sequence. In embodiments, the NLS sequence, e.g., the second NLS sequence, comprises an SV40A5 NLS, e.g., a bipartite SV40A5 NLS, e.g., comprising the amino acid sequence KRTADGSEFESPKKKAKVE (SEQ ID NO: 11,098), or an amino acid sequence having at least 70%, 75%, 80%, 85%, 90%, 95%, or 99% identity thereto. In certain embodiments, the NLS sequence, e.g., the second NLS sequence, comprises the amino acid sequence KRTADGSEFEKRTADGSEFESPKKKAKVE (SEQ ID NO: 11,099), or an amino acid sequence having at least 70%, 75%, 80%, 85%, 90%, 95%, or 99% identity thereto.

[0659] In certain embodiments, the heterologous gene modifying polypeptide further comprises a spacer sequence between the second NLS and the T2A sequence and/or puromycin sequence. In certain embodiments, the spacer sequence between the second NLS and the T2A sequence and/or puromycin sequence comprises 1, 2, 3, 4, 5, 6, 7, 8, 9, or 10 amino acids. In certain embodiments, the spacer sequence between the second NLS and the T2A sequence and/or puromycin sequence comprises the amino acid sequence GSG.

### Additional Linkers and RT Domains

[0660] In some embodiments, the heterologous gene modifying polypeptide comprises a linker (e.g., as described herein) and an RT domain (e.g., as described herein). In certain embodiments, the heterologous gene modifying polypeptide comprises, in N-terminal to C-terminal order, a linker (e.g., as described herein) and an RT domain (e.g., as described herein).

[0661] In certain embodiments, the linker comprises a linker sequence as listed in Table 10, or an amino acid sequence having at least 70%, 75%, 80%, 85%, 90%, 95%, or 99% identity thereto. In certain embodiments, the linker comprises a linker sequence of an exemplary heterologous gene modifying polypeptide listed in Table T1, or an amino acid sequence having at least 70%, 75%, 80%, 85%, 90%, 95%, or 99% identity thereto. In certain embodiments, the RT domain comprises an RT domain sequence as listed in Table 6, or an amino acid sequence having at least 70%, 75%, 80%, 85%, 90%, 95%, or 99% identity thereto. In certain embodiments, the RT domain comprises an RT domain sequence of an exemplary heterologous gene modifying polypeptide listed in Table T1, or an amino acid sequence having at least 70%, 75%, 80%, 85%, 90%, 95%, or 99% identity thereto.

[0662] In some embodiments, a heterologous gene modifying polypeptide comprises a linker of a gene modifying polypeptide as listed in Table T1, or a linker comprising an amino acid sequence having at least 70%, 75%, 80%, 85%, 90%, 95%, or 99% identity thereto.

[0663] In some embodiments, a heterologous gene modifying polypeptide comprises an RT domain of a heterologous gene modifying polypeptide as listed in Table T1, or an RT domain comprising an amino acid sequence having at least 70%, 75%, 80%, 85%, 90%, 95%, or 99% identity thereto.

[0664] In certain embodiments, the linker and the RT domain of a heterologous gene modifying polypeptide comprise the amino acid sequences of a linker and RT domain (or amino acid sequences having at least 70%, 75%, 80%, 85%, 90%, 95%, or 99% identity thereto) from a single row of Table T1 (e.g., from a single exemplary heterologous gene modifying polypeptide as listed in Table T1).

[0665] In certain embodiments, the linker and the RT domain of a heterologous gene modifying polypeptide comprise the amino acid sequences of a linker and RT domain (or amino acid sequences having at least 70%, 75%, 80%, 85%, 90%, 95%, or 99% identity thereto) from different rows of Table T1.

[0666] In certain embodiments, the heterologous gene modifying polypeptide further comprises a first NLS (e.g., a 5′ NLS), e.g., as described herein. In certain embodiments, the heterologous gene modifying polypeptide further comprises a second NLS (e.g., a 3′ NLS), e.g., as described herein. In certain embodiments, the heterologous gene modifying polypeptide further comprises an N-terminal methionine residue.

### RT Families and Mutants

[0667] In certain embodiments, the RT domain of a heterologous gene modifying polypeptide comprises the amino acid sequence of an RT domain of an AVIRE RT, or an amino acid sequence having at least 70%, 75%, 80%, 85%, 90%, 95%, or 99% identity thereto. In certain embodiments, the RT domain of a heterologous gene modifying polypeptide comprises the amino acid sequence of an RT domain of an MLVMS RT, or an amino acid sequence having at least 70%, 75%, 80%, 85%, 90%, 95%, or 99% identity thereto.

### Systems

[0668] In an aspect, the disclosure relates to a system comprising nucleic acid molecule encoding a heterologous gene modifying polypeptide (e.g., as described herein) and a template nucleic acid (e.g., a template RNA, e.g., as described herein). In certain embodiments, the nucleic acid molecule encoding the heterologous gene modifying polypeptide comprises one or more silent mutations in the coding region (e.g., in the sequence encoding the RT domain) relative to a nucleic acid molecule as described herein. In certain embodiments, the system further comprises a gRNA (e.g., a gRNA that binds to a polypeptide that induces a nick, e.g., in the opposite strand of the target DNA bound by the heterologous gene modifying polypeptide).

[0669] In certain embodiments, the nucleic acid molecule encoding the heterologous gene modifying polypeptide encodes a polypeptide as listed in Table T1, or an amino acid sequence having at least 70%, 75%, 80%, 85%, 90%, 95%, or 99% identity thereto.

[0670] In certain embodiments, the nucleic acid molecule encoding the heterologous gene modifying polypeptide comprises a sequence encoding a portion of a polypeptide listed in Table T1, wherein the portion comprises a linker and RT domain, or an amino acid sequence having at least 70%, 75%, 80%, 85%, 90%, 95%, or 99% identity to said portion.

[0671] In certain embodiments, the nucleic acid molecule encoding the heterologous gene modifying polypeptide comprises a sequence encoding the linker of a polypeptide as listed in Table T1, or an amino acid sequence having at least 70%, 75%, 80%, 85%, 90%, 95%, or 99% identity thereto.

[0672] In certain embodiments, the nucleic acid molecule encoding the heterologous gene modifying polypeptide comprises a sequence encoding the RT domain of a polypeptide as listed in Table T1, or an amino acid sequence having at least 70%, 75%, 80%, 85%, 90%, 95%, or 99% identity thereto.

[0673] In an aspect, the disclosure relates to a system comprising a heterologous gene modifying polypeptide (e.g., as described herein) and a template nucleic acid (e.g., a template RNA, e.g., as described herein).

[0674] In certain embodiments, the heterologous gene modifying polypeptide comprises a polypeptide as listed in Table T1, or an amino acid sequence having at least 70%, 75%, 80%, 85%, 90%, 95%, or 99% identity thereto.

[0675] In certain embodiments, the heterologous gene modifying polypeptide comprises a portion of a polypeptide listed in Table T1, wherein the portion comprises a linker and RT domain, or an amino acid sequence having at least 70%, 75%, 80%, 85%, 90%, 95%, or 99% identity to said portion.

[0676] In certain embodiments, the heterologous gene modifying polypeptide comprises the linker of a polypeptide as listed in Table T1, or an amino acid sequence having at least 70%, 75%, 80%, 85%, 90%, 95%, or 99% identity thereto.

[0677] In certain embodiments, the gene modifying polypeptide comprises the RT domain of a polypeptide as listed in Table T1, or an amino acid sequence having at least 70%, 75%, 80%, 85%, 90%, 95%, or 99% identity thereto.

### Additional Components of Heterologous Gene Modifying Systems

[0678] As disclosed herein, a heterologous gene modifying system RNA may further comprise an intracellular localization sequence. Additional details are provided in the section entitled “Localization sequence for gene modifying systems.” In some embodiments, the heterologous gene modifying system comprises an intein. Additional details are provided in the section entitled “Inteins.” In some embodiments, a heterologous gene modifying polypeptide may comprise a linker, e.g., a peptide linker, e.g., a linker as described in Table L1. Additional details are provided in the section entitled “Linkers”. The heterologous gene modifying polypeptide can bind a target DNA sequence and template nucleic acid (e.g., template RNA), nick the target site, and write (e.g., reverse transcribe) the template into DNA, resulting in a modification of the target site. In some embodiments, additional domains may be added to the polypeptide to enhance the efficiency of the process. In some embodiments, the heterologous gene modifying polypeptide may contain an additional DNA ligation domain to join reverse transcribed DNA to the DNA of the target site. In some embodiments, the polypeptide may comprise a heterologous RNA-binding domain. In some embodiments, the polypeptide may comprise a domain having 5′ to 3′ exonuclease activity (e.g., wherein the 5′ to 3′ exonuclease activity increases repair of the alteration of the target site, e.g., in favor of alteration over the original genomic sequence). In some embodiments, the polypeptide may comprise a domain having 3′ to 5′ exonuclease activity, e.g., proof-reading activity. In some embodiments, the writing domain, e.g., RT domain, has 3′ to 5′ exonuclease activity, e.g., proof-reading activity.

Template Nucleic Acids for Use with Heterologous Gene Modifying Polypeptides

[0679] The heterologous gene modifying systems described herein can modify a host target DNA site using a template nucleic acid sequence. In some embodiments, the systems described herein transcribe an RNA sequence template into host target DNA sites by target-primed reverse transcription (TPRT). By modifying DNA sequence(s) via reverse transcription of the RNA sequence template directly into the host genome, the system can insert an object sequence into a target genome without the need for exogenous DNA sequences to be introduced into the host cell (unlike, for example, CRISPR systems), as well as eliminate an exogenous DNA insertion step. The system can also delete a sequence from the target genome or introduce a substitution using an object sequence. Therefore, the system provides a platform for the use of customized RNA sequence templates containing object sequences, e.g., sequences comprising heterologous gene coding and/or function information.

[0680] In some embodiments, the template nucleic acid comprises one or more sequence (e.g., 2 sequences) that binds the heterologous gene modifying polypeptide.

[0681] In some embodiments a system or method described herein comprises a single template nucleic acid (e.g., template RNA). In some embodiments a system or method described herein comprises a plurality of template nucleic acids (e.g., template RNAs). For example, a system described herein comprises a first RNA comprising (e.g., from 5′ to 3′) a sequence that binds the heterologous gene modifying polypeptide (e.g., the DNA-binding domain and/or the endonuclease domain, e.g., a gRNA) and a sequence that binds a target site (e.g., a second strand of a site in a target genome), and a second RNA (e.g., a template RNA) comprising (e.g., from 5′ to 3′) optionally a sequence that binds the heterologous gene modifying polypeptide (e.g., that specifically binds the RT domain), a heterologous object sequence, and a PBS sequence. In some embodiments, when the system comprises a plurality of nucleic acids, each nucleic acid comprises a conjugating domain. In some embodiments, a conjugating domain enables association of nucleic acid molecules, e.g., by hybridization of complementary sequences. For example, in some embodiments a first RNA comprises a first conjugating domain and a second RNA comprises a second conjugating domain, and the first and second conjugating domains are capable of hybridizing to one another, e.g., under stringent conditions. In some embodiments, the stringent conditions for hybridization include hybridization in 4× sodium chloride/sodium citrate (SSC), at about 65 C, followed by a wash in 1×SSC, at about 65 C.

[0682] In some embodiments, the template nucleic acid comprises RNA. In some embodiments, the template nucleic acid comprises DNA (e.g., single stranded or double stranded DNA).

[0683] In some embodiments, the template nucleic acid comprises one or more (e.g., 2) homology domains that have homology to the target sequence. In some embodiments, the homology domains are about 10-20, 20-50, or 50-100 nucleotides in length.

[0684] In some embodiments, a template RNA can comprise a gRNA sequence, e.g., to direct the heterologous gene modifying polypeptide to a target site of interest. In some embodiments, a template RNA comprises (e.g., from 5′ to 3′) (i) optionally a gRNA spacer that binds a target site (e.g., a second strand of a site in a target genome), (ii) optionally a gRNA scaffold that binds a polypeptide described herein (e.g., a heterologous gene modifying polypeptide or a Cas polypeptide), (iii) a heterologous object sequence comprising a mutation region (optionally the heterologous object sequence comprises, from 5′ to 3′, a first homology region, a mutation region, and a second homology region), and (iv) a primer binding site (PBS) sequence comprising a 3′ target homology domain.

[0685] The template nucleic acid (e.g., template RNA) component of a genome editing system described herein typically is able to bind the heterologous gene modifying polypeptide of the system. In some embodiments the template nucleic acid (e.g., template RNA) has a 3′ region that is capable of binding a heterologous gene modifying polypeptide. The binding region, e.g., 3′ region, may be a structured RNA region, e.g., having at least 1, 2, or 3 hairpin loops, capable of binding the heterologous gene modifying polypeptide of the system. The binding region may associate the template nucleic acid (e.g., template RNA) with any of the polypeptide modules. In some embodiments, the binding region of the template nucleic acid (e.g., template RNA) may associate with an RNA-binding domain in the polypeptide. In some embodiments, the binding region of the template nucleic acid (e.g., template RNA) may associate with the reverse transcription domain of the heterologous gene modifying polypeptide (e.g., specifically bind to the RT domain). In some embodiments, the template nucleic acid (e.g., template RNA) may associate with the DNA binding domain of the polypeptide, e.g., a gRNA associating with a Cas9-derived DNA binding domain. In some embodiments, the binding region may also provide DNA target recognition, e.g., a gRNA hybridizing to the target DNA sequence and binding the polypeptide, e.g., a Cas9 domain. In some embodiments, the template nucleic acid (e.g., template RNA) may associate with multiple components of the polypeptide, e.g., DNA binding domain and reverse transcription domain.

[0686] In some embodiments the template RNA has a poly-A tail at the 3′ end. In some embodiments the template RNA does not have a poly-A tail at the 3′ end.

[0687] In some embodiments, the template nucleic acid is a template RNA. In some embodiments, the template RNA comprises one or more modified nucleotides. For example, in some embodiments, the template RNA comprises one or more deoxyribonucleotides. In some embodiments, regions of the template RNA are replaced by DNA nucleotides, e.g., to enhance stability of the molecule. For example, the 3′ end of the template may comprise DNA nucleotides, while the rest of the template comprises RNA nucleotides that can be reverse transcribed. For instance, in some embodiments, the heterologous object sequence is primarily or wholly made up of RNA nucleotides (e.g., at least 90%, 95%, 98%, or 99% RNA nucleotides). In some embodiments, the PBS sequence is primarily or wholly made up of DNA nucleotides (e.g., at least 90%, 95%, 98%, or 99% DNA nucleotides). In other embodiments, the heterologous object sequence for writing into the genome may comprise DNA nucleotides. In some embodiments, the DNA nucleotides in the template are copied into the genome by a domain capable of DNA-dependent DNA polymerase activity. In some embodiments, the DNA-dependent DNA polymerase activity is provided by a DNA polymerase domain in the polypeptide. In some embodiments, the DNA-dependent DNA polymerase activity is provided by a reverse transcriptase domain that is also capable of DNA-dependent DNA polymerization, e.g., second strand synthesis. In some embodiments, the template molecule is composed of only DNA nucleotides.

[0688] In some embodiments, a system described herein comprises two nucleic acids which together comprise the sequences of a template RNA described herein. In some embodiments, the two nucleic acids are associated with each other non-covalently, e.g., directly associated with each other (e.g., via base pairing), or indirectly associated as part of a complex comprising one or more additional molecule.

[0689] A template RNA described herein may comprise, from 5′ to 3′: (1) a gRNA spacer; (2) a gRNA scaffold; (3) heterologous object sequence (4) a primer binding site (PBS) sequence. Each of these components is now described in more detail.

gRNA Spacer and gRNA Scaffold

[0690] A template RNA described herein may comprise a gRNA spacer that directs the heterologous gene modifying system to a target nucleic acid, and a gRNA scaffold that promotes association of the template RNA with the Cas domain of the heterologous gene modifying polypeptide. The systems described herein can also comprise a gRNA that is not part of a template nucleic acid. For example, a gRNA that comprises a gRNA spacer and gRNA scaffold, but not a heterologous object sequence or a PBS sequence, can be used, e.g., to induce second strand nicking, e.g., as described in the section herein entitled “Second Strand Nicking”.

[0691] In some embodiments, the gRNA is a short synthetic RNA composed of a scaffold sequence that participates in CRISPR-associated protein binding and a user-defined ˜20 nucleotide targeting sequence for a genomic target. The structure of a complete gRNA was described by Nishimasu et al. Cell 156, P935-949 (2014). The gRNA (also referred to as sgRNA for single-guide RNA) consists of crRNA- and tracrRNA-derived sequences connected by an artificial tetraloop. The crRNA sequence can be divided into guide (20 nt) and repeat (12 nt) regions, whereas the tracrRNA sequence can be divided into anti-repeat (14 nt) and three tracrRNA stem loops (Nishimasu et al. Cell 156, P935-949 (2014)). In practice, guide RNA sequences are generally designed to have a length of between 17-24 nucleotides (e.g., 19, 20, or 21 nucleotides) and be complementary to a targeted nucleic acid sequence. Custom gRNA generators and algorithms are available commercially for use in the design of effective guide RNAs. In some embodiments, the gRNA comprises two RNA components from the native CRISPR system, e.g. crRNA and tracrRNA. As is well known in the art, the gRNA may also comprise a chimeric, single guide RNA (sgRNA) containing sequence from both a tracrRNA (for binding the nuclease) and at least one crRNA (to guide the nuclease to the sequence targeted for editing/binding). Chemically modified sgRNAs have also been demonstrated to be effective for use with CRISPR-associated proteins; see, for example, Hendel et al. (2015) Nature Biotechnol., 985-991. In some embodiments, a gRNA spacer comprises a nucleic acid sequence that is complementary to a DNA sequence associated with a target gene.

[0692] In some embodiments, the region of the template nucleic acid, e.g., template RNA, comprising the gRNA adopts an underwound ribbon-like structure of gRNA bound to target DNA (e.g., as described in Mulepati et al. Science 19 Sep. 2014:Vol. 345, Issue 6203, pp. 1479-1484). Without wishing to be bound by theory, this non-canonical structure is thought to be facilitated by rotation of every sixth nucleotide out of the RNA-DNA hybrid. Thus, in some embodiments, the region of the template nucleic acid, e.g., template RNA, comprising the gRNA may tolerate increased mismatching with the target site at some interval, e.g., every sixth base. In some embodiments, the region of the template nucleic acid, e.g., template RNA, comprising the gRNA comprising homology to the target site may possess wobble positions at a regular interval, e.g., every sixth base, that do not need to base pair with the target site.

[0693] In some embodiments, the template nucleic acid (e.g., template RNA) has at least 15, 16, 17, 18, 19, 20, 21, 22, 23, or 24 bases of at least 80%, 85%, 90%, 95%, 99%, or 100% homology to the target site, e.g., at the 5′ end, e.g., comprising a gRNA spacer sequence of length appropriate to the Cas9 domain of the heterologous gene modifying polypeptide (Table 8A).

[0694] In some embodiments, a Cas9 derivative with enhanced activity may be used in the gene modification polypeptide. In some embodiments, a Cas9 derivative may comprise mutations that improve activity of the HNH endonuclease domain, e.g., SpyCas9 R221K, N394K, or mutations that improve R-loop formation, e.g., SpyCas9 L1245V, or comprise a combination of such mutations, e.g., SpyCas9 R221K/N394K, SpyCas9 N394K/L1245V, SpyCas9 R221K/L1245V, or SpyCas9 R221K/N394K/L1245V (see, e.g., Spencer and Zhang Sci Rep 7:16836 (2017), the Cas9 derivatives and comprising mutations of which are incorporated herein by reference). In some embodiments, a Cas9 derivative may comprise one or more types of mutations described herein, e.g., PAM-modifying mutations, protein stabilizing mutations, activity enhancing mutations, and/or mutations partially or fully inactivating one or two endonuclease domains relative to the parental enzyme (e.g., one or more mutations to abolish endonuclease activity towards one or both strands of a target DNA, e.g., a nickase or catalytically dead enzyme). In some embodiments, a Cas9 enzyme used in a system described herein may comprise mutations that confer nickase activity toward the enzyme (e.g., SpyCas9 N863A or H840A) in addition to mutations improving catalytic efficiency (e.g., SpyCas9 R221K, N394K, and/or L1245V). In some embodiments, a Cas9 enzyme used in a system described herein is a SpyCas9 enzyme or derivative that further comprises an N863A mutation to confer nickase activity in addition to R221K and N394K mutations to improve catalytic efficiency.

[0695] Table 12 provides parameters to define components for designing gRNA and/or Template RNAs to apply Cas variants listed in Table 8A for gene modifying. The cut site indicates the validated or predicted protospacer adjacent motif (PAM) requirements, validated or predicted location of cut site (relative to the most upstream base of the PAM site). The gRNA for a given enzyme can be assembled by concatenating the crRNA, Tetraloop, and tracrRNA sequences, and further adding a 5′ spacer of a length within Spacer (min) and Spacer (max) that matches a protospacer at a target site. Further, the predicted location of the ssDNA nick at the target is important for designing a PBS sequence of a Template RNA that can anneal to the sequence immediately 5′ of the nick in order to initiate target primed reverse transcription. In some embodiments, a gRNA scaffold described herein comprises a nucleic acid sequence comprising, in the 5′ to 3′ direction, a crRNA of Table 12, a tetraloop from the same row of Table 12, and a tracrRNA from the same row of Table 12, or a sequence having at least 70%, 80%, 85%, 90%, 95%, or 99% identity thereto. In some embodiments, the gRNA or template RNA comprising the scaffold further comprises a gRNA spacer having a length within the Spacer (min) and Spacer (max) indicated in the same row of Table 12. In some embodiments, the gRNA or template RNA having a sequence according to Table 12 is comprised by a system that further comprises a heterologous gene modifying polypeptide, wherein the heterologous gene modifying polypeptide comprises a Cas domain described in the same row of Table 12.

TABLE 12
Parameters to define components for designing gRNA and/or Template RNAs to apply Cas variants listed in Table 8A
in systems

| | | | | Spacer | Spacer | | SEQ ID | | | SEQ ID |
|---|---|---|---|---|---|---|---|---|---|---|
| Variant | PAM(s) | Cut | Tier | (min) | (max) | crRNA | NO: | Tetraloop | tracrRNA | NO: |
| Nme2Cas9 | NNNNCC | −3 | 1 | 22 | 24 | GTTGTAG | 10,051 | GAAA | CGAAATGAGAACCGTTGCTACAAT | 10,151 |
| | | | | | | CTCCCTT | | | AAGGCCGTCTGAAAAGATGTGCCG | |
| | | | | | | TCTCATT | | | CAACGCTCTGCCCCTTAAAGCTTC | |
| | | | | | | TCG | | | TGCTTTAAGGGGCATCGTTTA | |
| PpnCas9 | NNNNRT | | 1 | 21 | 24 | GTTGTAG | 10,052 | GAAA | GCGAAATGAAAAACGTTGTTACAA | 10,152 |
| | T | | | | | CTCCCTT | | | TAAGAGATGAATTTCTCGCAAAGC | |
| | | | | | | TTTCATT | | | TCTGCCTCTTGAAATTTCGGTTTCA | |
| | | | | | | TCGC | | | AGAGGCATC | |
| SauCas9 | NNGRR; | −3 | 1 | 21 | 23 | GTTTTAG | 10,053 | GAAA | CAGAATCTACTAAAACAAGGCAA | 10,153 |
| | NNGRRT | | | | | TACTCTG | | | AATGCCGTGTTTATCTCGTCAACTT | |
| | | | | | | | | | GTTGGCGAGA | |
| SauCas9- | NNNRR; | −3 | 1 | 21 | 21 | GTTTTAG | 10,054 | GAAA | CAGAATCTACTAAAACAAGGCAA | 10,154 |
| KKH | NNNRRT | | | | | TACTCTG | | | AATGCCGTGTTTATCTCGTCAACTT | |
| | | | | | | | | | GTTGGCGAGA | |
| SauriCas9 | NNGG | −3 | 1 | 21 | 21 | GTTTTAG | 10,055 | GAAA | CAGAATCTACTAAAACAAGGCAA | 10,155 |
| | | | | | | TACTCTG | | | AATGCCGTGTTTATCTCGTCAACTT | |
| | | | | | | | | | GTTGGCGAGA | |
| SauriCas9- | NNRG | −3 | 1 | 21 | 21 | GTTTTAG | 10,056 | GAAA | CAGAATCTACTAAAACAAGGCAA | 10,156 |
| KKH | | | | | | TACTCTG | | | AATGCCGTGTTTATCTCGTCAACTT | |
| | | | | | | | | | GTTGGCGAGA | |
| ScaCas9-Sc++ | NNG | −3 | 1 | 20 | 20 | GTTTTAG | 10,057 | GAAA | TAGCAAGTTAAAATAAGGCTAGTC | 10,157 |
| | | | | | | AGCTA | | | CGTTATCAACTTGAAAAAGTGGCA | |
| | | | | | | | | | CCGAGTCGGTGC | |
| Spy Cas9 | NGG | −3 | 1 | 20 | 20 | GTTTTAG | 10,058 | GAAA | TAGCAAGTTAAAATAAGGCTAGTC | 10,158 |
| | | | | | | AGCTA | | | CGTTATCAACTTGAAAAAGTGGCA | |
| | | | | | | | | | CCGAGTCGGTGC | |
| SpyCas9_i_v1 | NGG | −3 | 1 | 20 | 20 | GTTTTAG | 10,058 | GAAA | TAGCAAGTTAAAATAAGGCTAGTC | 10,193 |
| | | | | | | AGCTA | | | CGTTATCAACTTGGACTTCGGTCC | |
| | | | | | | | | | AAGTGGCACCGAGTCGGTGC | |
| SpyCas9_i_v2 | NGG | −3 | 1 | 20 | 20 | GTTTTAG | 10,058 | GAAA | TAGCAAGTTAAAATAAGGCTAGTC | 10,194 |
| | | | | | | AGCTA | | | CGTTATCAACTTGGAGCTTGCTCC | |
| | | | | | | | | | AAGTGGCACCGAGTCGGTGC | |
| SpyCas9_i_v3 | NGG | −3 | 1 | 20 | 20 | GTTTTAG | 10,058 | GAAA | GTTTTAGAGCTAGAAATAGCAAGT | 10,195 |
| | | | | | | AGCTA | | | TAAAATAAGGCTAGTCCGTTATCG | |
| | | | | | | | | | ACTTGAAAAAGTCGCACCGAGTCG | |
| | | | | | | | | | GTGC | |
| Spy Cas9-NG | NG | −3 | 1 | 20 | 20 | GTTTTAG | 10,059 | GAAA | TAGCAAGTTAAAATAAGGCTAGTC | 10,159 |
| | (NGG = NGA = | | | | | AGCTA | | | CGTTATCAACTTGAAAAAGTGGCA | |
| | NGT > NGC) | | | | | | | | CCGAGTCGGTGC | |
| Spy Cas9- | NRN > NYN | −3 | 1 | 20 | 20 | GTTTTAG | 10,060 | GAAA | TAGCAAGTTAAAATAAGGCTAGTC | 10,160 |
| SpRY | | | | | | AGCTA | | | CGTTATCAACTTGAAAAAGTGGCA | |
| | | | | | | | | | CCGAGTCGGTGC | |
| St1Cas9 | NNAGAAW > | −3 | 1 | 20 | 20 | GTCTTTG | 10,061 | GTAC | CAGAAGCTACAAAGATAAGGCTTC | 10,161 |
| | NNAGGAW = | | | | | TACTCTG | | | ATGCCGAAATCAACACCCTGTCAT | |
| | NNGGAAW | | | | | | | | TTTATGGCAGGGTGTTTT | |
| BlatCas9 | NNNNCNAA > | −3 | 1 | 19 | 23 | GCTATAG | 10,062 | GAAA | GGTAAGTTGCTATAGTAAGGGCAA | 10,162 |
| | NNNNCNDD > | | | | | TTCCTTA | | | CAGACCCGAGGCGTTGGGGATCGC | |
| | NNNNC | | | | | CT | | | CTAGCCCGTGTTTACGGGCTCTCC | |
| | | | | | | | | | CCATATTCAAAATAATGACAGACG | |
| | | | | | | | | | AGCACCTTGGAGCATTTATCTCCG | |
| | | | | | | | | | AGGTGCT | |
| cCas9-v16 | NNVACT; | −3 | 2 | 21 | 21 | GTCTTAG | 10,063 | GAAA | CAGAATCTACTAAGACAAGGCAA | 10,163 |
| | NNVATGM; | | | | | TACTCTG | | | AATGCCGTGTTTATCTCGTCAACTT | |
| | NNVATT; | | | | | | | | GTTGGCGAGA | |
| | NNVGCT; | | | | | | | | | |
| | NNVGTG; | | | | | | | | | |
| | NNVGTT | | | | | | | | | |
| cCas9-v17 | NNVRRN | −3 | 2 | 21 | 21 | GTCTTAG | 10,064 | GAAA | CAGAATCTACTAAGACAAGGCAA | 10,164 |
| | | | | | | TACTCTG | | | AATGCCGTGTTTATCTCGTCAACTT | |
| | | | | | | | | | GTTGGCGAGA | |
| cCas9-v21 | NNVACT; | −3 | 2 | 21 | 21 | GTCTTAG | 10,065 | GAAA | CAGAATCTACTAAGACAAGGCAA | 10,165 |
| | NNVATGM; | | | | | TACTCTG | | | AATGCCGTGTTTATCTCGTCAACTT | |
| | NNVATT; | | | | | | | | GTTGGCGAGA | |
| | NNVGCT; | | | | | | | | | |
| | NNVGTG; | | | | | | | | | |
| | NNVGTT | | | | | | | | | |
| cCas9-v42 | NNVRRN | −3 | 2 | 21 | 21 | GTCTTAG | 10,066 | GAAA | CAGAATCTACTAAGACAAGGCAA | 10,166 |
| | | | | | | TACTCTG | | | AATGCCGTGTTTATCTCGTCAACTT | |
| | | | | | | | | | GTTGGCGAGA | |
| CdiCas9 | NNRHHHY; | | 2 | 22 | 22 | ACTGGG | 10,067 | GAAA | CTGAACCTCAGTAAGCATTGGCTC | 10,167 |
| | NNRAAAY | | | | | GTTCAG | | | GTTTCCAATGTTGATTGCTCCGCC | |
| | | | | | | | | | GGTGCTCCTTATTTTTAAGGGCGC | |
| | | | | | | | | | CGGC | |
| CjeCas9 | NNNNR | −3 | 2 | 21 | 23 | GTTTTAG | 10,068 | GAAA | AGGGACTAAAATAAAGAGTTTGC | 10,168 |
| | YAC | | | | | TCCCT | | | GGGACTCTGCGGGGTTACAATCCC | |
| | | | | | | | | | CTAAAACCGC | |
| GeoCas9 | NNNNCR | | 2 | 21 | 23 | GTCATAG | 10,069 | GAAA | TCAGGGTTACTATGATAAGGGCTT | 10,169 |
| | AA | | | | | TTCCCCT | | | TCTGCCTAAGGCAGACTGACCCGC | |
| | | | | | | GA | | | GGCGTTGGGGATCGCCTGTCGCCC | |
| | | | | | | | | | GCTTTTGGCGGGCATTCCCCATCC | |
| | | | | | | | | | TT | |
| iSpy MacCas9 | NAAN | −3 | 2 | 19 | 21 | GTTTTAG | 10,070 | GAAA | TAGCAAGTTAAAATAAGGCTAGTC | 10,170 |
| | | | | | | AGCTA | | | CGTTATCAACTTGAAAAAGTGGCA | |
| | | | | | | | | | CCGAGTCGGTGC | |
| NmeCas9 | NNNNGAYT; | −3 | 2 | 20 | 24 | GTTGTAG | 10,071 | GAAA | CGAAATGAGAACCGTTGCTACAAT | 10,171 |
| | NNNNGYTT; | | | | | CTCCCTT | | | AAGGCCGTCTGAAAAGATGTGCCG | |
| | NNNNGAYA; | | | | | TCTCATT | | | CAACGCTCTGCCCCTTAAAGCTTC | |
| | NNNNGTCT | | | | | TCG | | | TGCTTTAAGGGGCATCGTTTA | |
| ScaCas9 | NNG | −3 | 2 | 20 | 20 | GTTTTAG | 10,072 | GAAA | TAGCAAGTTAAAATAAGGCTAGTC | 10,172 |
| | | | | | | AGCTA | | | CGTTATCAACTTGAAAAAGTGGCA | |
| | | | | | | | | | CCGAGTCGGTGC | |
| ScaCas9- | NNG | −3 | 2 | 20 | 20 | GTTTTAG | 10,073 | GAAA | TAGCAAGTTAAAATAAGGCTAGTC | 10,173 |
| HiFi-Sc++ | | | | | | AGCTA | | | CGTTATCAACTTGAAAAAGTGGCA | |
| | | | | | | | | | CCGAGTCGGTGC | |
| Spy Cas9- | NRRH | −3 | 2 | 20 | 20 | GTTTAAG | 10,074 | GAAA | CAGCATAGCAAGTTTAAATAAGGC | 10,174 |
| 3var-NRRH | | | | | | AGCTATG | | | TAGTCCGTTATCAACTTGAAAAAG | |
| | | | | | | CTG | | | TGGCACCGAGTCGGTGC | |
| Spy Cas9- | NRTH | −3 | 2 | 20 | 20 | GTTTAAG | 10,075 | GAAA | CAGCATAGCAAGTTTAAATAAGGC | 10,175 |
| 3var-NRTH | | | | | | AGCTATG | | | TAGTCCGTTATCAACTTGAAAAAG | |
| | | | | | | CTG | | | TGGCACCGAGTCGGTGC | |
| Spy Cas9- | NRCH | −3 | 2 | 20 | 20 | GTTTAAG | 10,076 | GAAA | CAGCATAGCAAGTTTAAATAAGGC | 10,176 |
| 3var-NRCH | | | | | | AGCTATG | | | TAGTCCGTTATCAACTTGAAAAAG | |
| | | | | | | CTG | | | TGGCACCGAGTCGGTGC | |
| Spy Cas9-HF1 | NGG | −3 | 2 | 20 | 20 | GTTTTAG | 10,077 | GAAA | TAGCAAGTTAAAATAAGGCTAGTC | 10,177 |
| | | | | | | AGCTA | | | CGTTATCAACTTGAAAAAGTGGCA | |
| | | | | | | | | | CCGAGTCGGTGC | |
| Spy Cas9- | NAAG | −3 | 2 | 20 | 20 | GTTTTAG | 10,078 | GAAA | TAGCAAGTTAAAATAAGGCTAGTC | 10,178 |
| QQR1 | | | | | | AGCTA | | | CGTTATCAACTTGAAAAAGTGGCA | |
| | | | | | | | | | CCGAGTCGGTGC | |
| Spy Cas9-SpG | NGN | −3 | 2 | 20 | 20 | GTTTTAG | 10,079 | GAAA | TAGCAAGTTAAAATAAGGCTAGTC | 10,179 |
| | | | | | | AGCTA | | | CGTTATCAACTTGAAAAAGTGGCA | |
| | | | | | | | | | CCGAGTCGGTGC | |
| Spy Cas9- | NGAN | −3 | 2 | 20 | 20 | GTTTTAG | 10,080 | GAAA | TAGCAAGTTAAAATAAGGCTAGTC | 10,180 |
| VQR | | | | | | AGCTA | | | CGTTATCAACTTGAAAAAGTGGCA | |
| | | | | | | | | | CCGAGTCGGTGC | |
| Spy Cas9- | NGCG | −3 | 2 | 20 | 20 | GTTTTAG | 10,081 | GAAA | TAGCAAGTTAAAATAAGGCTAGTC | 10,181 |
| VRER | | | | | | AGCTA | | | CGTTATCAACTTGAAAAAGTGGCA | |
| | | | | | | | | | CCGAGTCGGTGC | |
| Spy Cas9-xCas | NG; GAA; | −3 | 2 | 20 | 20 | GTTTAAG | 10,082 | GAAA | CAGCATAGCAAGTTTAAATAAGGC | 10,182 |
| | GAT | | | | | AGCTATG | | | TAGTCCGTTATCAACTTGAAAAAG | |
| | | | | | | CTG | | | TGGCACCGAGTCGGTGC | |
| Spy Cas9- | NG | −3 | 2 | 20 | 20 | GTTTAAG | 10,083 | GAAA | CAGCATAGCAAGTTTAAATAAGGC | 10,183 |
| xCas-NG | | | | | | AGCTATG | | | TAGTCCGTTATCAACTTGAAAAAG | |
| | | | | | | CTG | | | TGGCACCGAGTCGGTGC | |
| St1Cas9- | NNACA | −3 | 2 | 20 | 20 | GTCTTTG | 10,084 | GTAC | CAGAAGCTACAAAGATAAGGCTTC | 10,184 |
| CNRZ1066 | A | | | | | TACTCTG | | | ATGCCGAAATCAACACCCTGTCAT | |
| | | | | | | | | | TTTATGGCAGGGTGTTTT | |
| St1Cas9- | NNGCA | −3 | 2 | 20 | 20 | GTCTTTG | 10,085 | GTAC | CAGAAGCTACAAAGATAAGGCTTC | 10,185 |
| LMG1831 | A | | | | | TACTCTG | | | ATGCCGAAATCAACACCCTGTCAT | |
| | | | | | | | | | TTTATGGCAGGGTGTTTT | |
| St1Cas9- | NNAAA | −3 | 2 | 20 | 20 | GTCTTTG | 10,086 | GTAC | CAGAAGCTACAAAGATAAGGCTTC | 10,186 |
| MTH17CL396 | A | | | | | TACTCTG | | | ATGCCGAAATCAACACCCTGTCAT | |
| | | | | | | | | | TTTATGGCAGGGTGTTTT | |
| St1Cas9- | NNGAA | −3 | 2 | 20 | 20 | GTCTTTG | 10,087 | GTAC | CAGAAGCTACAAAGATAAGGCTTC | 10,187 |
| TH1477 | A | | | | | TACTCTG | | | ATGCCGAAATCAACACCCTGTCAT | |
| | | | | | | | | | TTTATGGCAGGGTGTTTT | |
| sRGN3.1 | NNGG | | 1 | 21 | 23 | GTTTTAG | 10,088 | GAAA | CAGAATCTACTGAAACAAGACAAT | 10,188 |
| | | | | | | TACTCTG | | | ATGTCGTGTTTATCCCATCAATTTA | |
| | | | | | | | | | TTGGTGGGATTTT | |
| sRGN3.3 | NNGG | | 1 | 21 | 23 | GTTTTAG | 10,089 | GAAA | CAGAATCTACTGAAACAAGACAAT | 10,189 |
| | | | | | | TACTCTG | | | ATGTCGTGTTTATCCCATCAATTTA | |
| | | | | | | | | | TTGGTGGGATTTT | |

[0696] Herein, when an RNA sequence (e.g., a template RNA sequence) is said to comprise a particular sequence (e.g., a sequence of Table 12 or a portion thereof) that comprises thymine (T), it is of course understood that the RNA sequence may (and frequently does) comprise uracil (U) in place of T. For instance, the RNA sequence may comprise U at every position shown as T in the sequence in Table 12. More specifically, the present disclosure provides an RNA sequence according to every gRNA scaffold sequence of Table 12, wherein the RNA sequence has a U in place of each T in the sequence in Table 12. Additionally, it is understood that terminal Us and Ts may optionally be added or removed from tracrRNA sequences and may be modified or unmodified when provided as RNA. Without wishing to be bound by example, versions of gRNA scaffold sequences alternative to those exemplified in Table 12 may also function with the different Cas9 enzymes or derivatives thereof exemplified in Table 8A, e.g., alternate gRNA scaffold sequences with nucleotide additions, substitutions, or deletions, e.g., sequences with stem-loop structures added or removed. It is contemplated herein that the gRNA scaffold sequences represent a component of systems that can be similarly optimized for a given system, Cas-RT fusion polypeptide, indication, target mutation, template RNA, or delivery vehicle.

### Heterologous Object Sequence

[0697] A template RNA described herein may comprise a heterologous object sequence that the heterologous gene modifying polypeptide can use as a template for reverse transcription, to write a desired sequence into the target nucleic acid. In some embodiments, the heterologous object sequence comprises, from 5′ to 3′, a post-edit homology region, the mutation region, and a pre-edit homology region. Without wishing to be bound by theory, an RT performing reverse transcription on the template RNA first reverse transcribes the pre-edit homology region, then the mutation region, and then the post-edit homology region, thereby creating a DNA strand comprising the desired mutation with a homology region on either side.

[0698] In some embodiments, the heterologous object sequence is at least 32, 33, 34, 35, 36, 37, 38, 39, 40, 41, 42, 43, 44, 45, 46, 47, 48, 49, 50, 51, 52, 53, 54, 55, 56, 57, 58, 59, 60, 61, 62, 63, 64, 65, 66, 67, 68, 69, 70, 71, 72, 73, 74, 75, 76, 77, 78, 79, 80, 81, 82, 83, 84, 85, 86, 87, 88, 89, 90, 91, 92, 93, 94, 95, 96, 97, 98, 99, 100, 120, 140, 160, 180, 200, 500, or 1,000 nucleotides (nts) in length, or at least 1, 1.5, 2, 2.5, 3, 3.5, 4, 4.5, 5, 5.5, 6, 6.5, 7, 7.5, 8, 8.5, 9, 9.5, or 10 kilobases in length. In some embodiments, the heterologous object sequence is no more than 33, 34, 35, 36, 37, 38, 39, 40, 41, 42, 43, 44, 45, 46, 47, 48, 49, 50, 51, 52, 53, 54, 55, 56, 57, 58, 59, 60, 61, 62, 63, 64, 65, 66, 67, 68, 69, 70, 71, 72, 73, 74, 75, 76, 77, 78, 79, 80, 81, 82, 83, 84, 85, 86, 87, 88, 89, 90, 91, 92, 93, 94, 95, 96, 97, 98, 99, 100, 120, 140, 160, 180, 200, 500, 1,000, or 2000 nucleotides (nts) in length, or no more than 20, 15, 10, 9, 8, 7, 6, 5, 4, or 3 kilobases in length. In some embodiments, the heterologous object sequence is 30-1000, 40-1000, 50-1000, 60-1000, 70-1000, 74-1000, 75-1000, 76-1000, 77-1000, 78-1000, 79-1000, 80-1000, 85-1000, 90-1000, 100-1000, 120-1000, 140-1000, 160-1000, 180-1000, 200-1000, 500-1000, 30-500, 40-500, 50-500, 60-500, 70-500, 74-500, 75-500, 76-500, 77-500, 78-500, 79-500, 80-500, 85-500, 90-500, 100-500, 120-500, 140-500, 160-500, 180-500, 200-500, 30-200, 40-200, 50-200, 60-200, 70-200, 74-200, 75-200, 76-200, 77-200, 78-200, 79-200, 80-200, 85-200, 90-200, 100-200, 120-200, 140-200, 160-200, 180-200, 30-100, 40-100, 50-100, 60-100, 70-100, 74-100, 75-100, 76-100, 77-100, 78-100, 79-100, 80-100, 85-100, or 90-100 nucleotides (nts) in length, or 1-20, 1-15, 1-10, 1-9, 1-8, 1-7, 1-6, 1-5, 1-4, 1-3, 1-2, 2-20, 2-15, 2-10, 2-9, 2-8, 2-7, 2-6, 2-5, 2-4, 2-3, 3-20, 3-15, 3-10, 3-9, 3-8, 3-7, 3-6, 3-5, 3-4, 4-20, 4-15, 4-10, 4-9, 4-8, 4-7, 4-6, 4-5, 5-20, 5-15, 5-10, 5-9, 5-8, 5-7, 5-6, 6-20, 6-15, 6-10, 6-9, 6-8, 6-7, 7-20, 7-15, 7-10, 7-9, 7-8, 8-20, 8-15, 8-10, 8-9, 9-20, 9-15, 9-10, 10-15, 10-20, or 15-20 kilobases in length. In some embodiments, the heterologous object sequence is 10-100, 10-90, 10-80, 10-70, 10-60, 10-50, 10-40, 10-30, or 10-20 nt in length, e.g., 10-80, 10-50, or 10-20 nt in length, e.g., about 10-20 nt in length. In some embodiments, the heterologous object sequence is 8-30, 9-25, 10-20, 11-16, or 12-15 nucleotides in length, e.g., is 11-16 nt in length. Without wishing to be bound by theory, in some embodiments, a larger insertion size, larger region of editing (e.g., the distance between a first edit/substitution and a second edit/substitution in the target region), and/or greater number of desired edits (e.g., mismatches of the heterologous object sequence to the target genome), may result in a longer optimal heterologous object sequence.

[0699] In certain embodiments, the template nucleic acid comprises a customized RNA sequence template which can be identified, designed, engineered and constructed to contain sequences altering or specifying host genome function, for example by introducing a heterologous coding region into a genome; affecting or causing exon structure/alternative splicing, e.g., leading to exon skipping of one or more exons; causing disruption of an endogenous gene, e.g., creating a genetic knockout; causing transcriptional activation of an endogenous gene; causing epigenetic regulation of an endogenous DNA; causing up-regulation of one or more operably linked genes, e.g., leading to gene activation or overexpression; causing down-regulation of one or more operably linked genes, e.g., creating a genetic knock-down; etc. In certain embodiments, a customized RNA sequence template can be engineered to contain sequences coding for exons and/or transgenes, provide binding sites for transcription factor activators, repressors, enhancers, etc., and combinations thereof. In some embodiments, a customized template can be engineered to encode a nucleic acid or peptide tag to be expressed in an endogenous RNA transcript or endogenous protein operably linked to the target site. In other embodiments, the coding sequence can be further customized with splice donor sites, splice acceptor sites, or poly-A tails.

[0700] The template nucleic acid (e.g., template RNA) of the system typically comprises an object sequence (e.g., a heterologous object sequence) for writing a desired sequence into a target DNA. The object sequence may be coding or non-coding. The template nucleic acid (e.g., template RNA) can be designed to result in insertions, mutations, or deletions at the target DNA locus. In some embodiments, the template nucleic acid (e.g., template RNA) may be designed to cause an insertion in the target DNA. For example, the template nucleic acid (e.g., template RNA) may contain a heterologous sequence, wherein the reverse transcription will result in insertion of the heterologous sequence into the target DNA. In other embodiments, the RNA template may be designed to introduce a deletion into the target DNA. For example, the template nucleic acid (e.g., template RNA) may match the target DNA upstream and downstream of the desired deletion, wherein the reverse transcription will result in the copying of the upstream and downstream sequences from the template nucleic acid (e.g., template RNA) without the intervening sequence, e.g., causing deletion of the intervening sequence. In other embodiments, the template nucleic acid (e.g., template RNA) may be designed to introduce an edit into the target DNA. For example, the template RNA may match the target DNA sequence with the exception of one or more nucleotides, wherein the reverse transcription will result in the copying of these edits into the target DNA, e.g., resulting in mutations, e.g., transition or transversion mutations.

[0701] In some embodiments, writing of an object sequence into a target site results in the substitution of nucleotides, e.g., where the full length of the object sequence corresponds to a matching length of the target site with one or more mismatched bases. In some embodiments, a heterologous object sequence may be designed such that a combination of sequence alterations may occur, e.g., a simultaneous addition and deletion, addition and substitution, or deletion and substitution.

[0702] In some embodiments, the heterologous object sequence may contain an open reading frame or a fragment of an open reading frame. In some embodiments the heterologous object sequence has a Kozak sequence. In some embodiments the heterologous object sequence has an internal ribosome entry site. In some embodiments the heterologous object sequence has a self-cleaving peptide such as a T2A or P2A site. In some embodiments the heterologous object sequence has a start codon. In some embodiments the template RNA has a splice acceptor site. In some embodiments the template RNA has a splice donor site. Exemplary splice acceptor and splice donor sites are described in WO2016044416, incorporated herein by reference in its entirety. Exemplary splice acceptor site sequences are known to those of skill in the art. In some embodiments the template RNA has a microRNA binding site downstream of the stop codon. In some embodiments the template RNA has a polyA tail downstream of the stop codon of an open reading frame. In some embodiments the template RNA comprises one or more exons. In some embodiments the template RNA comprises one or more introns. In some embodiments the template RNA comprises a eukaryotic transcriptional terminator. In some embodiments the template RNA comprises an enhanced translation element or a translation enhancing element. In some embodiments the RNA comprises the human T-cell leukemia virus (HTLV-1) R region. In some embodiments the RNA comprises a posttranscriptional regulatory element that enhances nuclear export, such as that of Hepatitis B Virus (HPRE) or Woodchuck Hepatitis Virus (WPRE).

[0703] In some embodiments, the heterologous object sequence may contain a non-coding sequence. For example, the template nucleic acid (e.g., template RNA) may comprise a regulatory element, e.g., a promoter or enhancer sequence or miRNA binding site. In some embodiments, integration of the object sequence at a target site will result in upregulation of an endogenous gene. In some embodiments, integration of the object sequence at a target site will result in downregulation of an endogenous gene. In some embodiments the template nucleic acid (e.g., template RNA) comprises a tissue specific promoter or enhancer, each of which may be unidirectional or bidirectional. In some embodiments the promoter is an RNA polymerase I promoter, RNA polymerase II promoter, or RNA polymerase III promoter. In some embodiments the promoter comprises a TATA element. In some embodiments the promoter comprises a B recognition element. In some embodiments the promoter has one or more binding sites for transcription factors.

[0704] In some embodiments, the template nucleic acid (e.g., template RNA) comprises a site that coordinates epigenetic modification. In some embodiments, the template nucleic acid (e.g., template RNA) comprises a chromatin insulator. For example, the template nucleic acid (e.g., template RNA) comprises a CTCF site or a site targeted for DNA methylation.

[0705] In some embodiments, the template nucleic acid (e.g., template RNA) comprises a gene expression unit composed of at least one regulatory region operably linked to an effector sequence. The effector sequence may be a sequence that is transcribed into RNA (e.g., a coding sequence or a non-coding sequence such as a sequence encoding a micro RNA).

[0706] In some embodiments, the heterologous object sequence of the template nucleic acid (e.g., template RNA) is inserted into a target genome in an endogenous intron. In some embodiments, the heterologous object sequence of the template nucleic acid (e.g., template RNA) is inserted into a target genome and thereby acts as a new exon. In some embodiments, the insertion of the heterologous object sequence into the target genome results in replacement of a natural exon or the skipping of a natural exon.

[0707] The template nucleic acid (e.g., template RNA) can be designed to result in insertions, mutations, or deletions at the target DNA locus. In some embodiments, the template nucleic acid (e.g., template RNA) may be designed to cause an insertion in the target DNA. For example, the template nucleic acid (e.g., template RNA) may contain a heterologous object sequence, wherein the reverse transcription will result in insertion of the heterologous object sequence into the target DNA. In other embodiments, the RNA template may be designed to write a deletion into the target DNA. For example, the template nucleic acid (e.g., template RNA) may match the target DNA upstream and downstream of the desired deletion, wherein the reverse transcription will result in the copying of the upstream and downstream sequences from the template nucleic acid (e.g., template RNA) without the intervening sequence, e.g., causing deletion of the intervening sequence. In other embodiments, the template nucleic acid (e.g., template RNA) may be designed to write an edit into the target DNA. For example, the template RNA may match the target DNA sequence with the exception of one or more nucleotides, wherein the reverse transcription will result in the copying of these edits into the target DNA, e.g., resulting in mutations, e.g., transition or transversion mutations.

[0708] In some embodiments, the pre-edit homology domain comprises a nucleic acid sequence having 100% sequence identity with a nucleic acid sequence comprised in a target nucleic acid molecule.

[0709] In some embodiments, the post-edit homology domain comprises a nucleic acid sequence having 100% sequence identity with a nucleic acid sequence comprised in a target nucleic acid molecule.

### PBS Sequence

[0710] In some embodiments, a template nucleic acid (e.g., template RNA) comprises a primer binding site (PBS) sequence. In some embodiments, a PBS sequence is disposed 3′ of the heterologous object sequence and is complementary to a sequence adjacent to a site to be modified by a system described herein, or comprises no more than 1, 2, 3, 4, or 5 mismatches to a sequence complementary to the sequence adjacent to a site to be modified by the system/heterologous gene modifying polypeptide. In some embodiments, the PBS sequence binds within 1, 2, 3, 4, 5, 6, 7, 8, 9, or 10 nucleotides of a nick site in the target nucleic acid molecule. In some embodiments, binding of the PBS sequence to the target nucleic acid molecule permits initiation of target-primed reverse transcription (TPRT), e.g., with the 3′ homology domain acting as a primer for TPRT. In some embodiments, the PBS sequence is 3-5, 5-10, 10-30, 10-25, 10-20, 10-19, 10-18, 10-17, 10-16, 10-15, 10-14, 10-13, 10-12, 10-11, 11-30, 11-25, 11-20, 11-19, 11-18, 11-17, 11-16, 11-15, 11-14, 11-13, 11-12, 12-30, 12-25, 12-20, 12-19, 12-18, 12-17, 12-16, 12-15, 12-14, 12-13, 13-30, 13-25, 13-20, 13-19, 13-18, 13-17, 13-16, 13-15, 13-14, 14-30, 14-25, 14-20, 14-19, 14-18, 14-17, 14-16, 14-15, 15-30, 15-25, 15-20, 15-19, 15-18, 15-17, 15-16, 16-30, 16-25, 16-20, 16-19, 16-18, 16-17, 17-30, 17-25, 17-20, 17-19, 17-18, 18-30, 18-25, 18-20, 18-19, 19-30, 19-25, 19-20, 20-30, 20-25, or 25-30 nucleotides in length, e.g., 10-17, 12-16, or 12-14 nucleotides in length. In some embodiments, the PBS sequence is 5-20, 8-16, 8-14, 8-13, 9-13, 9-12, or 10-12 nucleotides in length, e.g., 9-12 nucleotides in length.

[0711] The template nucleic acid (e.g., template RNA) may have some homology to the target DNA. In some embodiments, the template nucleic acid (e.g., template RNA) PBS sequence domain may serve as an annealing region to the target DNA, such that the target DNA is positioned to prime the reverse transcription of the template nucleic acid (e.g., template RNA). In some embodiments the template nucleic acid (e.g., template RNA) has at least 2, 3, 4, 5, 6, 7, 8, 9, 10, 11, 12, 13, 14, 15, 20, 25, 30, 35, 40, 45, 50, 60, 70, 80, 90, 100, 110, 120, 130, 140, 150, 175, 200 or more bases of exact homology to the target DNA at the 3′ end of the RNA. In some embodiments the template nucleic acid (e.g., template RNA) has at least 2, 3, 4, 5, 6, 7, 8, 9, 10, 11, 12, 13, 14, 15, 20, 25, 30, 35, 40, 45, 50, 60, 70, 80, 90, 100, 110, 120, 130, 140, 150, 175, 200 or more bases of at least 50%, 60%, 70%, 80%, 85%, 90%, 95%, 97%, 98%, 99% or 100% homology to the target DNA, e.g., at the 5′ end of the template nucleic acid (e.g., template RNA).

[0712] The template RNA sequences may be customized depending on the cell being targeted. For example, in some embodiments it is desired to inactivate a PAM sequence upon editing (e.g., using a “PAM-kill” modification) to decrease the potential for further gene editing (e.g., by Cas retargeting) following the initial edit. Consequently, certain template RNAs described herein are designed to write a mutation (e.g., a substitution) into the PAM of the target site, such that upon editing, the PAM site will be mutated to a sequence no longer recognized by the heterologous gene modifying polypeptide. Thus, a mutation region within the heterologous object sequence of the template RNA may comprise a PAM-kill sequence. Without wishing to be bound by theory, in some embodiments, a PAM-kill sequence prevents re-engagement of the heterologous gene modifying polypeptide upon completion of a genetic modification, or decreases re-engagement relative to a template RNA lacking a PAM-kill sequence. In some embodiments, a PAM-kill sequence does not alter the amino acid sequence encoded by a gene, e.g., the PAM-kill sequence results in a silent mutation. In other embodiments, it is desired to leave the PAM sequence intact (no PAM-kill).

[0713] Similarly, in some embodiments, to decrease the potential for further gene editing (e.g., by Cas retargeting) following the initial edit, it may be desirable to alter the first three nucleotides of the RT template sequence via a “seed-kill” motif. Consequently, certain template RNAs described herein are designed to write a mutation (e.g., a substitution) into the portion of the target site corresponding to the first three nucleotides of the RT template sequence, such that upon editing, the target site will be mutated to a sequence with lower homology to the RT template sequence. Thus, a mutation region within the heterologous object sequence of the template RNA may comprise a seed-kill sequence. Without wishing to be bound by theory, in some embodiments, a seed-kill sequence prevents re-engagement of the heterologous gene modifying polypeptide upon completion of genetic modification, or decreases re-engagement relative to an otherwise similar template RNA lacking a seed-kill sequence. In some embodiments, a seed-kill sequence does not alter the amino acid sequence encoded by a gene, e.g., the seed-kill sequence results in a silent mutation. In other embodiments, it is desired to leave the seed region intact, and a seed-kill sequence is not used.

[0714] In further embodiments, to optimize or improve gene editing efficiency, it may be desirable to evade the target cell's mismatch repair or nucleotide repair pathways or to bias the target cell's repair pathways toward preservation of the edited strand. In some embodiments, multiple silent mutations (for example, silent substitutions) may be introduced within the RT template sequence to evade the target cell's mismatch repair or nucleotide repair pathways or to bias the target cell's repair pathways toward preservation of the edited strand.

### Target Nucleic Acid Site

[0715] In some embodiments, after gene modification, the target site surrounding the edited sequence contains a limited number of insertions or deletions, for example, in less than about 50% or 10% of editing events, e.g., as determined by long-read amplicon sequencing of the target site, e.g., as described in Karst et al. (2020) bioRxiv doi.org/10.1101/645903 (incorporated by reference herein in its entirety). In some embodiments, the target site does not show multiple consecutive editing events, e.g., head-to-tail or head-to-head duplications, e.g., as determined by long-read amplicon sequencing of the target site, e.g., as described in Karst et al. bioRxiv doi.org/10.1101/645903 (2020) (incorporated herein by reference in its entirety). In some embodiments, the target site contains an integrated sequence corresponding to the template RNA. In some embodiments, the target site does not contain insertions resulting from endogenous RNA in more than about 1% or 10% of events, e.g., as determined by long-read amplicon sequencing of the target site, e.g., as described in Karst et al. bioRxiv doi.org/10.1101/645903 (2020) (incorporated herein by reference in its entirety). In some embodiments, the target site contains the integrated sequence corresponding to the template RNA.

[0716] In certain aspects of the present invention, the host DNA-binding site integrated into by the system can be in a gene, in an intron, in an exon, an ORF, outside of a coding region of any gene, in a regulatory region of a gene, or outside of a regulatory region of a gene. In other aspects, the polypeptide may bind to one or more than one host DNA sequence.

[0717] In some embodiments, a system is used to edit a target locus in multiple alleles. In some embodiments, a system is designed to edit a specific allele. For example, a heterologous gene modifying polypeptide may be directed to a specific sequence that is only present on one allele, e.g., comprises a template RNA with homology to a target allele, e.g., a gRNA or annealing domain, but not to a second cognate allele. In some embodiments, a heterologous gene modifying system can alter a haplotype-specific allele. In some embodiments, a heterologous gene modifying system that targets a specific allele preferentially targets that allele, e.g., has at least a 2, 4, 6, 8, or 10-fold preference for a target allele.

### Second Strand Nicking

[0718] In some embodiments, a heterologous gene modifying system described herein comprises a nickase activity (e.g., in the heterologous gene modifying polypeptide) that nicks the first strand, and a nickase activity (e.g., in a polypeptide separate from the heterologous gene modifying polypeptide) that nicks the second strand of target DNA. As discussed herein, without wishing to be bound by theory, nicking of the first strand of the target site DNA is thought to provide a 3′ OH that can be used by an RT domain to reverse transcribe a sequence of a template RNA, e.g., a heterologous object sequence. Without wishing to be bound by theory, it is thought that introducing an additional nick to the second strand may bias the cellular DNA repair machinery to adopt the heterologous object sequence-based sequence more frequently than the original genomic sequence. In some embodiments, the additional nick to the second strand is made by the same endonuclease domain (e.g., nickase domain) as the nick to the first strand. In some embodiments, the same heterologous gene modifying polypeptide performs both the nick to the first strand and the nick to the second strand. In some embodiments, the heterologous gene modifying polypeptide comprises a CRISPR/Cas domain and the additional nick to the second strand is directed by an additional nucleic acid, e.g., comprising a second gRNA directing the CRISPR/Cas domain to nick the second strand. In other embodiments, the additional second strand nick is made by a different endonuclease domain (e.g., nickase domain) than the nick to the first strand. In some embodiments, that different endonuclease domain is situated in an additional polypeptide (e.g., a system of the invention further comprises the additional polypeptide), separate from the heterologous gene modifying polypeptide. In some embodiments, the additional polypeptide comprises an endonuclease domain (e.g., nickase domain) described herein. In some embodiments, the additional polypeptide comprises a DNA binding domain, e.g., described herein.

[0719] It is contemplated herein that the position at which the second strand nick occurs relative to the first strand nick may influence the extent to which one or more of: desired gene modifying DNA modifications are obtained, undesired double-strand breaks (DSBs) occur, undesired insertions occur, or undesired deletions occur. Without wishing to be bound by theory, second strand nicking may occur in two general orientations: inward nicks and outward nicks.

[0720] In some embodiments, in the inward nick orientation, the RT domain polymerizes (e.g., using the template RNA (e.g., the heterologous object sequence)) away from the second strand nick. In some embodiments, in the inward nick orientation, the location of the nick to the first strand and the location of the nick to the second strand are positioned between the first PAM site and second PAM site (e.g., in a scenario wherein both nicks are made by a polypeptide (e.g., a heterologous gene modifying polypeptide) comprising a CRISPR/Cas domain). When there are two PAMs on the outside and two nicks on the inside, this inward nick orientation can also be referred to as “PAM-out”. In some embodiments, in the inward nick orientation, the location of the nick to the first strand and the location of the nick to the second strand are between the sites where the polypeptide and the additional polypeptide bind to the target DNA. In some embodiments, in the inward nick orientation, the location of the nick to the second strand is positioned between the binding sites of the polypeptide and additional polypeptide, and the nick to the first strand is also located between the binding sites of the polypeptide and additional polypeptide. In some embodiments, in the inward nick orientation, the location of the nick to the first strand and the location of the nick to the second strand are positioned between the PAM site and the binding site of the second polypeptide which is at a distance from the target site.

[0721] An example of a heterologous gene modifying system that provides an inward nick orientation comprises a heterologous gene modifying polypeptide comprising a CRISPR/Cas domain, a template RNA comprising a gRNA that directs nicking of the target site DNA on the first strand, and an additional nucleic acid comprising an additional gRNA that directs nicking at a site a distance from the location of the first nick, wherein the location of the first nick and the location of the second nick are between the PAM sites of the sites to which the two gRNAs direct the heterologous gene modifying polypeptide. As a further example, another heterologous gene modifying system that provides an inward nick orientation comprises a heterologous gene modifying polypeptide comprising a zinc finger molecule and a first nickase domain wherein the zinc finger molecule binds to the target DNA in a manner that directs the first nickase domain to nick the first strand of the target site; an additional polypeptide comprising a CRISPR/Cas domain, and an additional nucleic acid comprising a gRNA that directs the additional polypeptide to nick a site a distance from the target site DNA on the second strand, wherein the location of the first nick and the location of the second nick are between the PAM site and the site to which the zinc finger molecule binds. As a further example, another heterologous gene modifying system that provides an inward nick orientation comprises a heterologous gene modifying polypeptide comprising a zinc finger molecule and a first nickase domain wherein the zinc finger molecule binds to the target DNA in a manner that directs the first nickase domain to nick the first strand of the target site; an additional polypeptide comprising a TAL effector molecule and a second nickase domain wherein the TAL effector molecule binds to a site a distance from the target site in a manner that directs the additional polypeptide to nick the second strand, wherein the location of the first nick and the location of the second nick are between the site to which the TAL effector molecule binds and the site to which the zinc finger molecule binds.

[0722] In some embodiments, in the outward nick orientation, the RT domain polymerizes (e.g., using the template RNA (e.g., the heterologous object sequence)) toward the second strand nick. In some embodiments, in the outward nick orientation when both the first and second nicks are made by a polypeptide comprising a CRISPR/Cas domain (e.g., a heterologous gene modifying polypeptide), the first PAM site and second PAM site are positioned between the location of the nick to the first strand and the location of the nick to the second strand. When there are two PAMs on the inside and two nicks on the outside, this outward nick orientation also can be referred to as “PAM-in”. In some embodiments, in the outward nick orientation, the polypeptide (e.g., the heterologous gene modifying polypeptide) and the additional polypeptide bind to sites on the target DNA between the location of the nick to the first strand and the location of the nick to the second. In some embodiments, in the outward nick orientation, the location of the nick to the second strand is positioned on the opposite side of the binding sites of the polypeptide and additional polypeptide relative to the location of the nick to the first strand. In some embodiments, in the outward orientation, the PAM site and the binding site of the second polypeptide which is at a distance from the target site are positioned between the location of the nick to the first strand and the location of the nick to the second strand.

[0723] An example of a heterologous gene modifying system that provides an outward nick orientation comprises a heterologous gene modifying polypeptide comprising a CRISPR/Cas domain, a template RNA comprising a gRNA that directs nicking of the target site DNA on the first strand, and an additional nucleic acid comprising an additional gRNA that directs nicking at a site a distance from the location of the first nick, wherein the location of the first nick and the location of the second nick are outside of the PAM sites of the sites to which the two gRNAs direct the heterologous gene modifying polypeptide (i.e., the PAM sites are between the location of the first nick and the location of the second nick). As a further example, another heterologous gene modifying system that provides an outward nick orientation comprises a heterologous gene modifying polypeptide comprising a zinc finger molecule and a first nickase domain wherein the zinc finger molecule binds to the target DNA in a manner that directs the first nickase domain to nick the first strand of the target site; an additional polypeptide comprising a CRISPR/Cas domain, and an additional nucleic acid comprising a gRNA that directs the additional polypeptide to nick a site a distance from the target site DNA on the second strand, wherein the location of the first nick and the location of the second nick are outside the PAM site and the site to which the zinc finger molecule binds (i.e., the PAM site and the site to which the zinc finger molecule binds are between the location of the first nick and the location of the second nick). As a further example, another heterologous gene modifying system that provides an outward nick orientation comprises a heterologous gene modifying polypeptide comprising a zinc finger molecule and a first nickase domain wherein the zinc finger molecule binds to the target DNA in a manner that directs the first nickase domain to nick the first strand of the target site; an additional polypeptide comprising a TAL effector molecule and a second nickase domain wherein the TAL effector molecule binds to a site a distance from the target site in a manner that directs the additional polypeptide to nick the second strand, wherein the location of the first nick and the location of the second nick are outside the site to which the TAL effector molecule binds and the site to which the zinc finger molecule binds (i.e., the site to which the TAL effector molecule binds and the site to which the zinc finger molecule binds are between the location of the first nick and the location of the second nick).

[0724] Without wishing to be bound by theory, it is thought that, for heterologous gene modifying systems where a second strand nick is provided, an outward nick orientation is preferred in some embodiments. As is described herein, an inward nick may produce a higher number of double-strand breaks (DSBs) than an outward nick orientation. DSBs may be recognized by the DSB repair pathways in the nucleus of a cell, which can result in undesired insertions and deletions. An outward nick orientation may provide a decreased risk of DSB formation, and a corresponding lower amount of undesired insertions and deletions. In some embodiments, undesired insertions and deletions are insertions and deletions not encoded by the heterologous object sequence, e.g., an insertion or deletion produced by the double-strand break repair pathway unrelated to the modification encoded by the heterologous object sequence. In some embodiments, a desired gene modification comprises a change to the target DNA (e.g., a substitution, insertion, or deletion) encoded by the heterologous object sequence (e.g., and achieved by the heterologous gene modifying writing the heterologous object sequence into the target site). In some embodiments, the first strand nick and the second strand nick are in an outward orientation.

[0725] In addition, the distance between the first strand nick and second strand nick may influence the extent to which one or more of: desired heterologous gene modifying system DNA modifications are obtained, undesired double-strand breaks (DSBs) occur, undesired insertions occur, or undesired deletions occur. Without wishing to be bound by theory, it is thought the second strand nick benefit, the biasing of DNA repair toward incorporation of the heterologous object sequence into the target DNA, increases as the distance between the first strand nick and second strand nick decreases. However, it is thought that the risk of DSB formation also increases as the distance between the first strand nick and second strand nick decreases. Correspondingly, it is thought that the number of undesired insertions and/or deletions may increase as the distance between the first strand nick and second strand nick decreases. In some embodiments, the distance between the first strand nick and second strand nick is chosen to balance the benefit of biasing DNA repair toward incorporation of the heterologous object sequence into the target DNA and the risk of DSB formation and of undesired deletions and/or insertions. In some embodiments, a system where the first strand nick and the second strand nick are at least a threshold distance apart has an increased level of desired heterologous gene modifying system modification outcomes, a decreased level of undesired deletions, and/or a decreased level of undesired insertions relative to an otherwise similar inward nick orientation system where the first nick and the second nick are less than the a threshold distance apart. In some embodiments the threshold distance(s) is given below.

[0726] In some embodiments, the first nick and the second nick are at least 20, 25, 30, 35, 40, 45, 50, 55, 60, 65, 70, 75, 80, 85, 90, 95, 100, 110, 120, 130, 140, 150, 160, 170, 180, 190, or 200 nucleotides apart. In some embodiments, the first nick and the second nick are no more than 25, 30, 35, 40, 45, 50, 55, 60, 65, 70, 75, 80, 85, 90, 95, 100, 110, 120, 130, 140, 150, 160, 170, 180, 190, 200, or 250 nucleotides apart. In some embodiments, the first nick and the second nick are 20-200, 30-200, 40-200, 50-200, 60-200, 70-200, 80-200, 90-200, 100-200, 110-200, 120-200, 130-200, 140-200, 150-200, 160-200, 170-200, 180-200, 190-200, 20-190, 30-190, 40-190, 50-190, 60-190, 70-190, 80-190, 90-190, 100-190, 110-190, 120-190, 130-190, 140-190, 150-190, 160-190, 170-190, 180-190, 20-180, 30-180, 40-180, 50-180, 60-180, 70-180, 80-180, 90-180, 100-180, 110-180, 120-180, 130-180, 140-180, 150-180, 160-180, 170-180, 20-170, 30-170, 40-170, 50-170, 60-170, 70-170, 80-170, 90-170, 100-170, 110-170, 120-170, 130-170, 140-170, 150-170, 160-170, 20-160, 30-160, 40-160, 50-160, 60-160, 70-160, 80-160, 90-160, 100-160, 110-160, 120-160, 130-160, 140-160, 150-160, 20-150, 30-150, 40-150, 50-150, 60-150, 70-150, 80-150, 90-150, 100-150, 110-150, 120-150, 130-150, 140-150, 20-140, 30-140, 40-140, 50-140, 60-140, 70-140, 80-140, 90-140, 100-140, 110-140, 120-140, 130-140, 20-130, 30-130, 40-130, 50-130, 60-130, 70-130, 80-130, 90-130, 100-130, 110-130, 120-130, 20-120, 30-120, 40-120, 50-120, 60-120, 70-120, 80-120, 90-120, 100-120, 110-120, 20-110, 30-110, 40-110, 50-110, 60-110, 70-110, 80-110, 90-110, 100-110, 20-100, 30-100, 40-100, 50-100, 60-100, 70-100, 80-100, 90-100, 20-90, 30-90, 40-90, 50-90, 60-90, 70-90, 80-90, 20-80, 30-80, 40-80, 50-80, 60-80, 70-80, 20-70, 30-70, 40-70, 50-70, 60-70, 20-60, 30-60, 40-60, 50-60, 20-50, 30-50, 40-50, 20-40, 30-40, or 20-30 nucleotides apart. In some embodiments, the first nick and the second nick are 40-100 nucleotides apart.

[0727] Without wishing to be bound by theory, it is thought that, for heterologous gene modifying systems where a second strand nick is provided and an inward nick orientation is selected, increasing the distance between the first strand nick and second strand nick may be preferred. As is described herein, an inward nick orientation may produce a higher number of DSBs than an outward nick orientation, and may result in a higher amount of undesired insertions and deletions than an outward nick orientation, but increasing the distance between the nicks may mitigate that increase in DSBs, undesired deletions, and/or undesired insertions. In some embodiments, an inward nick orientation wherein the first nick and the second nick are at least a threshold distance apart has an increased level of desired heterologous gene modifying system modification outcomes, a decreased level of undesired deletions, and/or a decreased level of undesired insertions relative to an otherwise similar inward nick orientation system where the first nick and the second nick are less than the a threshold distance apart. In some embodiments the threshold distance is given below.

[0728] In some embodiments, the first strand nick and the second strand nick are in an inward orientation. In some embodiments, the first strand nick and the second strand nick are in an inward orientation and the first strand nick and second strand nick are at least 100, 110, 120, 130, 140, 150, 160, 170, 180, 190, 200, 220, 240, 260, 280, 300, 350, 400, 450, or 500 nucleotides apart, e.g., at least 100 nucleotides apart, (and optionally no more than 500, 400, 300, 200, 190, 180, 170, 160, 150, 140, 130, or 120 nucleotides apart). In some embodiments, the first strand nick and the second strand nick are in an inward orientation and the first strand nick and second strand nick are 100-200, 110-200, 120-200, 130-200, 140-200, 150-200, 160-200, 170-200, 180-200, 190-200, 100-190, 110-190, 120-190, 130-190, 140-190, 150-190, 160-190, 170-190, 180-190, 100-180, 110-180, 120-180, 130-180, 140-180, 150-180, 160-180, 170-180, 100-170, 110-170, 120-170, 130-170, 140-170, 150-170, 160-170, 100-160, 110-160, 120-160, 130-160, 140-160, 150-160, 100-150, 110-150, 120-150, 130-150, 140-150, 100-140, 110-140, 120-140, 130-140, 100-130, 110-130, 120-130, 100-120, 110-120, or 100-110 nucleotides apart.

### Production of Compositions and Systems

[0729] Methods of designing and constructing nucleic acid constructs and proteins or polypeptides (such as the systems, constructs, and polypeptides described herein) are known. Generally, recombinant methods may be used. See, in general, Smales & James (Eds.), Therapeutic Proteins: Methods and Protocols (Methods in Molecular Biology), Humana Press (2005); and Crommelin, Sindelar & Meibohm (Eds.), Pharmaceutical Biotechnology: Fundamentals and Applications, Springer (2013). Methods of designing, preparing, evaluating, purifying and manipulating nucleic acid compositions are described in Green and Sambrook (Eds.), Molecular Cloning: A Laboratory Manual (Fourth Edition), Cold Spring Harbor Laboratory Press (2012).

[0730] The disclosure provides, in part, a nucleic acid, e.g., vector, encoding a gene modifying polypeptide described herein, a template nucleic acid described herein, or both. In some embodiments, a vector comprises a selective marker, e.g., an antibiotic resistance marker. In some embodiments, the antibiotic resistance marker is a kanamycin resistance marker. In some embodiments, the antibiotic resistance marker does not confer resistance to beta-lactam antibiotics. In some embodiments, the vector does not comprise an ampicillin resistance marker. In some embodiments, the vector comprises a kanamycin resistance marker and does not comprise an ampicillin resistance marker. In some embodiments, a vector encoding a gene modifying polypeptide is integrated into a target cell genome (e.g., upon administration to a target cell, tissue, organ, or subject). In some embodiments, a vector encoding a gene modifying polypeptide is not integrated into a target cell genome (e.g., upon administration to a target cell, tissue, organ, or subject). In some embodiments, a vector encoding a template nucleic acid (e.g., template RNA) is not integrated into a target cell genome (e.g., upon administration to a target cell, tissue, organ, or subject). In some embodiments, if a vector is integrated into a target site in a target cell genome, the selective marker is not integrated into the genome. In some embodiments, if a vector is integrated into a target site in a target cell genome, genes or sequences involved in vector maintenance (e.g., plasmid maintenance genes) are not integrated into the genome. In some embodiments, if a vector is integrated into a target site in a target cell genome, transfer regulating sequences (e.g., inverted terminal repeats, e.g., from an AAV) are not integrated into the genome. In some embodiments, administration of a vector (e.g., encoding a gene modifying polypeptide described herein, a template nucleic acid described herein, or both) to a target cell, tissue, organ, or subject results in integration of a portion of the vector into one or more target sites in the genome(s) of said target cell, tissue, organ, or subject. In some embodiments, less than 99, 95, 90, 80, 70, 60, 50, 40, 30, 20, 10, 5, 4, 3, 2, or 1% of target sites (e.g., no target sites) comprising integrated material comprise a selective marker (e.g., an antibiotic resistance gene), a transfer regulating sequence (e.g., an inverted terminal repeat, e.g., from an AAV), or both from the vector.

[0731] Exemplary methods for producing a therapeutic pharmaceutical protein or polypeptide described herein involve expression in mammalian cells, although recombinant proteins can also be produced using insect cells, yeast, bacteria, or other cells under control of appropriate promoters. Mammalian expression vectors may comprise non-transcribed elements such as an origin of replication, a suitable promoter, and other 5′ or 3′ flanking non-transcribed sequences, and 5′ or 3′ non-translated sequences such as necessary ribosome binding sites, a polyadenylation site, splice donor and acceptor sites, and termination sequences. DNA sequences derived from the SV40 viral genome, for example, SV40 origin, early promoter, splice, and polyadenylation sites may be used to provide other genetic elements required for expression of a heterologous DNA sequence. Appropriate cloning and expression vectors for use with bacterial, fungal, yeast, and mammalian cellular hosts are described in Green & Sambrook, Molecular Cloning: A Laboratory Manual (Fourth Edition), Cold Spring Harbor Laboratory Press (2012).

[0732] Various mammalian cell culture systems can be employed to express and manufacture recombinant protein. Examples of mammalian expression systems include CHO, COS, HEK293, HeLA, and BHK cell lines. Processes of host cell culture for production of protein therapeutics are described in Zhou and Kantardjieff (Eds.), Mammalian Cell Cultures for Biologics Manufacturing (Advances in Biochemical Engineering Biotechnology), Springer (2014). Compositions described herein may include a vector, such as a viral vector, e.g., a lentiviral vector, encoding a recombinant protein. In some embodiments, a vector, e.g., a viral vector, may comprise a nucleic acid encoding a recombinant protein.

[0733] Purification of protein therapeutics is described in Franks, Protein Biotechnology. Isolation, Characterization, and Stabilization, Humana Press (2013); and in Cutler, Protein Purification Protocols (Methods in Molecular Biology), Humana Press (2010).

[0734] In some embodiments, quality standards include, but are not limited to:
[0735] (i) the length of mRNA encoding the gene modifying polypeptide, e.g., whether the mRNA has a length that is above a reference length or within a reference length range, e.g., whether at least 80, 85, 90, 95, 96, 97, 98, or 99% of the mRNA present is greater than 3000, 4000, or 5000 nucleotides long;
[0736] (ii) the presence, absence, and/or length of a polyA tail on the mRNA, e.g., whether at least 80, 85, 90, 95, 96, 97, 98, or 99% of the mRNA present contains a polyA tail (e.g., a polyA tail that is at least 5, 10, 20, 30, 50, 70, 100 nucleotides in length);
[0737] (iii) the presence, absence, and/or type of a 5′ cap on the mRNA, e.g., whether at least 80, 85, 90, 95, 96, 97, 98, or 99% of the mRNA present contains a 5′ cap, e.g., whether that cap is a 7-methylguanosine cap, e.g., a O-Me-m7G cap;
[0738] (iv) the presence, absence, and/or type of one or more modified nucleotides (e.g., selected from pseudouridine, dihydrouridine, inosine, 7-methylguanosine, 1-N-methylpseudouridine (1-Me-Ψ), 5-methoxyuridine (5-MO-U), 5-methylcytidine (5mC), or a locked nucleotide) in the mRNA, e.g., whether at least 80, 85, 90, 95, 96, 97, 98, or 99% of the mRNA present contains one or more modified nucleotides;
[0739] (v) the stability of the mRNA (e.g., over time and/or under a pre-selected condition), e.g., whether at least 80, 85, 90, 95, 96, 97, 98, or 99% of the mRNA remains intact (e.g., greater than 100, 125, 150, 175, or 200 nucleotides long) after a stability test; or
[0740] (vi) the potency of the mRNA in a system for modifying DNA, e.g., whether at least 1% of target sites are modified after a system comprising the mRNA is assayed for potency.

### Kits, Articles of Manufacture, and Pharmaceutical Compositions

[0741] In an aspect the disclosure provides a kit comprising a gene modifying polypeptide or a gene modifying system, e.g., as described herein. In some embodiments, the kit comprises a gene modifying polypeptide (or a nucleic acid encoding the polypeptide) and a template RNA (or DNA encoding the template RNA). In some embodiments, the kit further comprises a reagent for introducing the system into a cell, e.g., transfection reagent, LNP, and the like. In some embodiments, the kit is suitable for any of the methods described herein. In some embodiments, the kit comprises one or more elements, compositions (e.g., pharmaceutical compositions), gene modifying polypeptides, and/or gene modifying systems, or a functional fragment or component thereof, e.g., disposed in an article of manufacture. In some embodiments, the kit comprises instructions for use thereof.

[0742] In an aspect, the disclosure provides an article of manufacture, e.g., in which a kit as described herein, or a component thereof, is disposed.

[0743] In an aspect, the disclosure provides a pharmaceutical composition comprising a gene modifying polypeptide or a gene modifying system, e.g., as described herein. In some embodiments, the pharmaceutical composition further comprises a pharmaceutically acceptable carrier or excipient. In some embodiments, the pharmaceutical composition comprises a template RNA and/or an RNA encoding the polypeptide. In embodiments, the pharmaceutical composition has one or more (e.g., 1, 2, 3, or 4) of the following characteristics:
[0744] (a) less than 1% (e.g., less than 0.5%, 0.4%, 0.3%, 0.2%, or 0.1%) DNA template relative to the template RNA and/or the RNA encoding the polypeptide, e.g., on a molar basis;
[0745] (b) less than 1% (e.g., less than 0.5%, 0.4%, 0.3%, 0.2%, or 0.1%) uncapped RNA relative to the template RNA and/or the RNA encoding the polypeptide, e.g., on a molar basis;
[0746] (c) less than 1% (e.g., less than 0.5%, 0.4%, 0.3%, 0.2%, or 0.1%) partial length RNAs relative to the template RNA and/or the RNA encoding the polypeptide, e.g., on a molar basis;
[0747] (d) substantially lacks unreacted cap dinucleotides.

### Chemistry, Manufacturing, and Controls (CMC)

[0748] Purification of protein therapeutics is described, for example, in Franks, Protein Biotechnology: Isolation, Characterization, and Stabilization, Humana Press (2013); and in Cutler, Protein Purification Protocols (Methods in Molecular Biology), Humana Press (2010).

[0749] In some embodiments, a gene modifying system, polypeptide, and/or template nucleic acid (e.g., template RNA) conforms to certain quality standards. In some embodiments, a gene modifying system, polypeptide, and/or template nucleic acid (e.g., template RNA) produced by a method described herein conforms to certain quality standards. Accordingly, the disclosure is directed, in some aspects, to methods of manufacturing a gene modifying system, polypeptide, and/or template nucleic acid (e.g., template RNA) that conforms to certain quality standards, e.g., in which said quality standards are assayed. The disclosure is also directed, in some aspects, to methods of assaying said quality standards in a gene modifying system, polypeptide, and/or template nucleic acid (e.g., template RNA). In some embodiments, quality standards include, but are not limited to, one or more (e.g., 1, 2, 3, 4, 5, 6, 7, 8, 9, 10, 11, or 12) of the following:
[0750] (i) the length of the template RNA, e.g., whether the template RNA has a length that is above a reference length or within a reference length range, e.g., whether at least 80, 85, 90, 95, 96, 97, 98, or 99% of the template RNA present is greater than 100, 125, 150, 175, or 200 nucleotides long;
[0751] (ii) the presence, absence, and/or length of a polyA tail on the template RNA, e.g., whether at least 80, 85, 90, 95, 96, 97, 98, or 99% of the template RNA present contains a polyA tail (e.g., a polyA tail that is at least 5, 10, 20, 30, 50, 70, 100 nucleotides in length (SEQ ID NO: 15550));
[0752] (iii) the presence, absence, and/or type of a 5′ cap on the template RNA, e.g., whether at least 80, 85, 90, 95, 96, 97, 98, or 99% of the template RNA present contains a 5′ cap, e.g., whether that cap is a 7-methylguanosine cap, e.g., a O-Me-m7G cap;
[0753] (iv) the presence, absence, and/or type of one or more modified nucleotides (e.g., selected from pseudouridine, dihydrouridine, inosine, 7-methylguanosine, 1-N-methylpseudouridine (1-Me-Ψ), 5-methoxyuridine (5-MO-U), 5-methylcytidine (5mC), or a locked nucleotide) in the template RNA, e.g., whether at least 80, 85, 90, 95, 96, 97, 98, or 99% of the template RNA present contains one or more modified nucleotides;
[0754] (v) the stability of the template RNA (e.g., over time and/or under a pre-selected condition), e.g., whether at least 80, 85, 90, 95, 96, 97, 98, or 99% of the template RNA remains intact (e.g., greater than 100, 125, 150, 175, or 200 nucleotides long) after a stability test;
[0755] (vi) the potency of the template RNA in a system for modifying DNA, e.g., whether at least 1% of target sites are modified after a system comprising the template RNA is assayed for potency;
[0756] (vii) the length of the polypeptide, first polypeptide, or second polypeptide, e.g., whether the polypeptide, first polypeptide, or second polypeptide has a length that is above a reference length or within a reference length range, e.g., whether at least 80, 85, 90, 95, 96, 97, 98, or 99% of the polypeptide, first polypeptide, or second polypeptide present is greater than 600, 650, 700, 750, 800, 850, 900, 950, 1000, 1050, 1100, 1150, 1200, 1250, 1300, 1350, 1400, 1450, 1500, 1600, 1700, 1800, 1900, or 2000 amino acids long (and optionally, no larger than 2500, 2000, 1500, 1400, 1300, 1200, 1100, 1000, 900, 800, 700, or 600 amino acids long);
[0757] (viii) the presence, absence, and/or type of post-translational modification on the polypeptide, first polypeptide, or second polypeptide, e.g., whether at least 80, 85, 90, 95, 96, 97, 98, or 99% of the polypeptide, first polypeptide, or second polypeptide contains phosphorylation, methylation, acetylation, myristoylation, palmitoylation, isoprenylation, glipyatyon, or lipoylation, or any combination thereof;
[0758] (ix) the presence, absence, and/or type of one or more artificial, synthetic, or non-canonical amino acids (e.g., selected from ornithine, β-alanine, GABA, δ-Aminolevulinic acid, PABA, a D-amino acid (e.g., D-alanine or D-glutamate), aminoisobutyric acid, dehydroalanine, cystathionine, lanthionine, Djenkolic acid, Diaminopimelic acid, Homoalanine, Norvaline, Norleucine, Homonorleucine, homoserine, O-methyl-homoserine and O-ethyl-homoserine, ethionine, selenocysteine, selenohomocysteine, selenomethionine, selenoethionine, tellurocysteine, or telluromethionine) in the polypeptide, first polypeptide, or second polypeptide, e.g., whether at least 80, 85, 90, 95, 96, 97, 98, or 99% of the polypeptide, first polypeptide, or second polypeptide present contains one or more artificial, synthetic, or non-canonical amino acids;
[0759] (x) the stability of the polypeptide, first polypeptide, or second polypeptide (e.g., over time and/or under a pre-selected condition), e.g., whether at least 80, 85, 90, 95, 96, 97, 98, or 99% of the polypeptide, first polypeptide, or second polypeptide remains intact (e.g., greater than 600, 650, 700, 750, 800, 850, 900, 950, 1000, 1050, 1100, 1150, 1200, 1250, 1300, 1350, 1400, 1450, 1500, 1600, 1700, 1800, 1900, or 2000 amino acids long (and optionally, no larger than 2500, 2000, 1500, 1400, 1300, 1200, 1100, 1000, 900, 800, 700, or 600 amino acids long)) after a stability test;
[0760] (xi) the potency of the polypeptide, first polypeptide, or second polypeptide in a system for modifying DNA, e.g., whether at least 1% of target sites are modified after a system comprising the polypeptide, first polypeptide, or second polypeptide is assayed for potency; or
[0761] (xii) the presence, absence, and/or level of one or more of a pyrogen, virus, fungus, bacterial pathogen, or host cell protein, e.g., whether the system is free or substantially free of pyrogen, virus, fungus, bacterial pathogen, or host cell protein contamination.

[0762] In some embodiments, a system or pharmaceutical composition described herein is endotoxin free.

[0763] In some embodiments, the presence, absence, and/or level of one or more of a pyrogen, virus, fungus, bacterial pathogen, and/or host cell protein is determined. In embodiments, whether the system is free or substantially free of pyrogen, virus, fungus, bacterial pathogen, and/or host cell protein contamination is determined.

[0764] In some embodiments, a pharmaceutical composition or system as described herein has one or more (e.g., 1, 2, 3, or 4) of the following characteristics:
[0765] (a) less than 1% (e.g., less than 0.5%, 0.4%, 0.3%, 0.2%, or 0.1%) DNA template relative to the template RNA and/or the RNA encoding the polypeptide, e.g., on a molar basis;
[0766] (b) less than 1% (e.g., less than 0.5%, 0.4%, 0.3%, 0.2%, or 0.1%) uncapped RNA relative to the template RNA and/or the RNA encoding the polypeptide, e.g., on a molar basis;
[0767] (c) less than 1% (e.g., less than 0.5%, 0.4%, 0.3%, 0.2%, or 0.1%) partial length RNAs relative to the template RNA and/or the RNA encoding the polypeptide, e.g., on a molar basis;
[0768] (d) substantially lacks unreacted cap dinucleotides.

### Applications

[0769] By integrating coding genes into a RNA sequence template, the gene modifying system can address therapeutic needs, for example, by providing expression of a therapeutic transgene in individuals with loss-of-function mutations, by replacing gain-of-function mutations with normal transgenes, by providing regulatory sequences to eliminate gain-of-function mutation expression, and/or by controlling the expression of operably linked genes, transgenes and systems thereof. In certain embodiments, the RNA sequence template encodes a promotor region specific to the therapeutic needs of the host cell, for example a tissue specific promotor or enhancer. In still other embodiments, a promotor can be operably linked to a coding sequence.

[0770] In embodiments, the gene modifying system can provide therapeutic transgenes expressing, e.g., replacement blood factors or replacement enzymes, e.g., lysosomal enzymes. For example, the compositions, systems and methods described herein are useful to express, in a target human genome, agalsidase alpha or beta for treatment of Fabry Disease; imiglucerase, taliglucerase alfa, velaglucerase alfa, or alglucerase for Gaucher Disease; sebelipase alpha for lysosomal acid lipase deficiency (Wolman disease/CESD); laronidase, idursulfase, elosulfase alpha, or galsulfase for mucopolysaccharidoses; alglucosidase alpha for Pompe disease. For example, the compositions, systems, and methods described herein are useful to express, in a target human genome factor I, II, V, VII, X, XI, XII or XIII for blood factor deficiencies.

[0771] In some embodiments, the heterologous object sequence encodes an intracellular protein (e.g., a cytoplasmic protein, a nuclear protein, an organellar protein such as a mitochondrial protein or lysosomal protein, or a membrane protein). In some embodiments, the heterologous object sequence encodes a membrane protein, e.g., a CAR or a membrane protein other than a CAR, and/or an endogenous human membrane protein. In some embodiments, the heterologous object sequence encodes an extracellular protein. In some embodiments, the heterologous object sequence encodes an enzyme, a structural protein, a signaling protein, a regulatory protein, a transport protein, a sensory protein, a motor protein, a defense protein, or a storage protein. Other exemplary proteins that may be encoded by a heterologous object sequence include, without limitation, an immune receptor protein, e.g. a synthetic immune receptor protein such as a chimeric antigen receptor protein (CAR), a T cell receptor, a B cell receptor, or an antibody.

### Chimeric Antigen Receptors

[0772] In some embodiments, the heterologous object sequence encodes a chimeric antigen receptor (CAR) comprising an antigen binding domain. In some embodiments, the CAR is or comprises a first generation CAR comprising an antigen binding domain, a transmembrane domain, and a single intracellular signaling domain. In some embodiments, the CAR is or comprises a second generation CAR comprising an antigen binding domain, a transmembrane domain, and two intracellular signaling domains (e.g., a first intracellular signaling domain and a second intracellular signaling domain). In some embodiments, the CAR comprises a third generation CAR comprising an antigen binding domain, a transmembrane domain, and at least three intracellular signaling domains. In some embodiments, a fourth generation CAR comprising an antigen binding domain, a transmembrane domain, three or four intracellular signaling domains, and a domain which upon successful signaling of the CAR induces expression of a cytokine gene. In some embodiments, the antigen binding domain is or comprises an scFv, Fab, a diabody, a D domain binder, centyrins (e.g., antibody-like scaffolds, e.g., a CARTyrin), one or more single domain antibodies such as VHH domains (e.g., comprises two VHH binding domains). In some embodiments, the CAR antigen binding domain binds to two epitopes of the target antigen (e.g., is a biepitopic binding domain). In some embodiments, the CAR comprises two antigen binding domains, such that each antigen binding domain binds to a different target antigen on a cell, e.g., a neoplastic cell.

### Antigen Binding Domains

[0773] In some embodiments, a CAR antigen binding domain is or comprises an antibody or antigen-binding portion thereof. In some embodiments, a CAR antigen binding domain is or comprises an scFv, Fab, a diabody, a D domain binder, centyrins (e.g., antibody-like scaffolds, e.g., a CARTyrin), one or more single domain antibodies such as VHH domains (e.g., comprises two VHH binding domains). In some embodiments, the CAR antigen binding domain binds to two epitopes of the target antigen (e.g., is a biepitopic binding domain). In some embodiments, the CAR comprises two antigen binding domains, such that each antigen binding domain binds to a different target antigen on a cell, e.g., a neoplastic cell.

[0774] In some embodiments, the CAR comprises a camelid antigen-binding domain. In some embodiments, the CAR comprises a murine binding domain. In some embodiments, the CAR comprises a humanized binding domain. In some embodiments, the CAR comprises a human binding domain.

[0775] In some embodiments, an antigen binding domain binds to a cell surface antigen of a cell. In some embodiments, a cell surface antigen is characteristic of one type of cell. In some embodiments, a cell surface antigen is characteristic of more than one type of cell. In some embodiments, the antigen binding domain targets an antigen characteristic of a neoplastic cell. In some embodiments, the antigen characteristic of a neoplastic cell is selected from a receptor listed in Table C1, or an antigenic fragment or antigenic portion thereof. In some embodiments, the antigen binding domain binds one or more antigens of a blood cancer (e.g., a leukemia, a lymphoma, or a multiple myeloma). In some embodiments, the blood cancer antigen is a B cell antigen. In some embodiments, the antigen is BCMA. In some embodiments, the antigen is GPRC5D. In some embodiments, the antigen is CD20. In some embodiments, the antigen binding domain binds an antigen of a solid tumor.

TABLE C1
Exemplary Neoplastic Cell Antigens

| | | | | |
|---|---|---|---|---|
| cell surface | NAV1.6 | Carbonic | prostate | p53 mutant |
| receptor | | anhydrase 1X | specific | |
| | | | membrane | |
| | | | antigen | |
| | | | (PSMA) | |
| an ion | NAV1.7 | PSMA | ROR1 | prostein |
| channel- | | | | |
| linked | | | | |
| receptor | | | | |
| an enzyme- | NAV1.8 | Folate | FLT3 | survivin |
| linked | | binding | | |
| receptor | | protein | | |
| a G protein- | NAV1.9 | Gangliosides | FAP | telomerase |
| coupled | | | | |
| receptor | | | | |
| receptor | sphingosin-1- | CD2 | TAG72 | PCTA- |
| tyrosine | phosphate | | | 1/Galectin 8 |
| kinase | receptor | | | |
| | (S1P1R) | | | |
| tyrosine | NMDA | CD3 | CD38 | MelanA/MART1 |
| kinase | channel | | | |
| associated | | | | |
| receptor | | | | |
| receptor-like | transmembrane | GM2) | CD44v6 | Ras mutant |
| tyrosine | protein | | | |
| phosphatase | | | | |
| receptor | multispan | Lewis-γ² | CEA | hTERT |
| serine/ | transmembrane | | | |
| threonine | protein | | | |
| kinase | | | | |
| receptor | T-cell receptor | VEGF | EPCAM | sarcoma |
| guanylyl | motifs | | | translocation |
| cyclase | | | | breakpoints |
| histidine | T-cell alpha | VEGFR | B7H3 | ML-IAP |
| kinase | chains | 1/2/3 | | |
| associated | | | | |
| receptor | | | | |
| ErbB1/EGFR | T-cell β chains | αVβ3 | KIT | ERG |
| | | | | (TMPRSS2 ETS |
| | | | | fusion gene) |
| ErbB2/HER2 | T-cell γ chains | α5β1 | interleukin-11 | NA17 |
| | | | receptor a (IL- | |
| | | | 11Ra) | |
| ErbB3/HER3 | T-cell δ chains | ErbB1/EGFR | PSCA | PAX3 |
| and | CCR7 | ErbB1/HER2 | PRSS21 | Androgen |
| ErbB4/HER4) | | | | receptor |
| FGF1 | CD3 | ErB3 | VEGFR2 | Cyclin B1 |
| FGF2 | CD4 | c-MET | LewisY | MYCN |
| FGF3 | CD5 | IGF1R | CD24 | RhoC |
| FGF4 | CD7 | EphA3 | platelet- | TRP-2 |
| | | | derived | |
| | | | growth factor | |
| | | | receptor-beta | |
| | | | (PDGFR-beta) | |
| FGF5 | CD8 | TRAIL-R1 | SSEA-4 | CYPIB I |
| FGF6 | CD11b | TRAIL-R2 | CD20 | BORIS |
| FGF7 | CD11c | RANKL | MUC1 | SART3 |
| FGF18 | CD16 | FAP | NCAM | PAX5 |
| FGF21 | CD19 | Tenascin | Prostase | OY-TES1 |
| VEGF-A | CD20 | PDL-1 | PAP | LCK |
| VEGF-B | CD21 | BAFF | ELF2M | AKAP-4 |
| VEGF-C | CD22 | HDAC | Ephrin B2 | SSX2 |
| VEGF-D | CD25 | ABL | IGF-1 | RAGE-1 |
| | | | receptor | |
| PIGF | CD28 | FLT3 | CAIX | human |
| | | | | telomerase |
| | | | | reverse |
| | | | | transcriptase |
| RET | CD34 | KIT | LMP2 | RU1 |
| Receptor and | | | | |
| the Eph | | | | |
| Receptor | | | | |
| Family | | | | |
| including | | | | |
| EphA1 | | | | |
| EphA2 | CD35 | MET | gplOO | RU2 |
| EphA3 | CD40 | RET | bcr-abl | intestinal |
| | | | | carboxyl esterase |
| EphA4 | CD45RA | IL-1β | tyrosinase | mut hsp70-2 |
| EphA5 | CD45RO | ALK | Fucosyl GM1 | CD79a |
| EphA6 | CD52 | RANKL | sLe | CD79b |
| EphA7 | CD56 | mTOR | GM3 | CD72 |
| EphA8 | CD62L | CTLA-4 | TGS5 | LAIR1 |
| EphA9 | CD68 | IL-6 | HMWMAA | FCAR |
| EphA10 | CD80 | IL-6R | o-acetyl-GD2 | LILRA2 |
| EphB1 | CD95 | JAK3 | Folate | CD300LF |
| | | | receptor beta | |
| EphB2. | CD117 | BRAF | TEM1/CD248 | CLEC12A |
| EphB3 | | | | |
| EphB4 | CD127 | PTCH | TEM7R | BST2 |
| EphB6 | CD133 | PIGF | CLDN6 | EMR2 |
| CXCR1 | CD137 (4-1 | ANPEP | GPRC5D | LY75 |
| | BB) | | | |
| CXCR2 | CD163 | TIMP1 | CXORF61 | GPC3 |
| CXCR3 | F4/80 | PLAUR | CD97 | FCRL5 |
| CXCR4 | IL-4Ra | PTPRJ | CD179a | IGLL1 |
| CXCR6 | Sca-1 | LTBR | ALK | a neoantigen |
| CCR1 | CTLA-4 | ANTXR1 | Polysialic | CD133 |
| | | | acid | |
| CCR2 | GITR | Folate | PLAC1 | CD15 |
| | | receptor alpha | | |
| | | (FRa) | | |
| CCR3 | GARP | ERBB2 | GloboH | CD184 |
| | | (Her2/neu) | | |
| CCR4 | LAP | EphA2 | NY-BR-1 | CD24 |
| CCR5 | granzyme B | IL-13Ra2 | UPK2 | CD56 |
| CCR6 | LFA-1 | epidermal | HAVCR1 | CD26 |
| | | growth factor | | |
| | | receptor | | |
| | | (EGFR) | | |
| CCR8 | transferrin | Mesothelin | ADRB3 | CD29 |
| | receptor | | | |
| CFTR | NKp46 | TSHR | PANX3 | CD44 |
| CIC-1 | perforin | CD19 | GPR20 | HLA-A |
| CIC-2 | CD4+ | CD123 | LY6K | HLA-B |
| CIC-4 | Th1 | CD22 | OR51E2 | HLA-C |
| CIC-5 | Th2 | CD30 | TARP | (HLA-A |
| CIC-7 | Th17 | CD171 | WT1 | B |
| CIC-Ka | Th40 | CS-1 | NY-ESO-1 | C) CD49f |
| CIC-Kb | Th22 | CLL-1 | LAGE-la | CD151 CD340 |
| Bestrophins | Th9 | CD33 | MAGE-A1 | CD200 |
| TMEM16A | Tfh | EGFRvIII | legumain | tkrA |
| GABA | Canonical | GD2 | HPV E6 | trkB |
| receptor | Treg. FoxP3+ | | | |
| glycin | Tr1 | GD3 | E7 | or trkC |
| receptor | | | | |
| ABC | Th3 | BCMA | ETV6-AML | TAG-72 |
| transporters | | | | |
| NAV1.1 | Treg17 | MUC16 | sperm protein | Tn Ag |
| | | (CA125) | 17 | |
| NAV1.2 | T_{RE}G | L1CAM | XAGE1 | p53 |
| NAV1.3 | CDCP1 | LeY | Tie 2 | Mucins |
| NAV1.4 | NT5E | MSLN | MAD-CT-1 | Claudin 18.2 |
| | | | | (CLDN18.2) |
| NAV1.5 | EpCAM | IL13Ra1 | MAD-CT-2 | |
| CEA | gpA33 | Fos-related | L1-CAM | |
| | | antigen 1 | | |

[0776] In some embodiments, the antigen binding domain targets an antigen characteristic of a T-cell. In some embodiments, the antigen characteristic of a T-cell is selected from an exemplary T cell antigen listed in Table C2, or an antigenic fragment thereof.

TABLE C2
Exemplary T-cell Antigens

| | | | | | |
|---|---|---|---|---|---|
| a cell surface receptor | CALM1 | HLA-DRB1 | MAP2K6 (MKK6) | NFKBIA | RAF1 |
| a membrane transport | CD3D | HLA-DRB3 | MAP2K7 (MKK7) | NRAS | RELA |
| protein | (CD3δ) | | | | |
| an active or passive | CD3E | HLA-DRB4 | MAP3K1 | PAK1 | SDF1 |
| transport protein | (CD3ε) | | (MEKK1) | | |
| an ion channel protein | CD3G | HLA-DRB5 | MAP3K3 | PAK2 | SHP2 |
| | (CD3γ) | | | | |
| a pore-forming protein | CD4 | HRAS | MAP3K4 | PAK3 | SLP76 |
| a transmembrane | CD8 | IKBKA | MAP3K5 | PAK4 | SOS |
| receptor | | (CHUK) | | | |
| a membrane enzyme | CD28 | IKBKB | MAP3K8 | PIK3C2B | SRC |
| a cell adhesion protein | CD45 | IKBKE | MAP3K14 (NIK) | PIK3C3 | TBK1 |
| characteristic of a T- | | | | (VPS34) | |
| cell | | | | | |
| a G protein-coupled | CD80 | IKBKG | MAPK8 (JNK1) | PIK3CA | TCRA |
| receptor | (B7-1) | (NEMO) | | | |
| receptor tyrosine | CD86 | IL2 | MAPK9 (JNK2) | PIK3CB | TEC |
| kinase | (B7-2) | | | | |
| tyrosine kinase | CD247 | ITPR1 | MAPK10 (JNK3) | PIK3CD | TRAF6 |
| associated receptor | (CD3ζ) | | | | |
| receptor-like tyrosine | CTLA4 | ITK | MAPK11 (p38β) | PIK3R1 | VAV1 |
| phosphatase | (CD152) | | | | |
| receptor | ELK1 | JUN | MAPK12 (p38γ) | PKCA | VAV2 |
| serine/threonine kinase | | | | | |
| receptor guanylyl | ERK1 | KRAS2 | MAPK13 (p38δ) | PKCB | ZAP70 |
| cyclase | (MAPK3) | | | | |
| histidine kinase | ERK2 | LAT | MAPK14 (p38α) | PKCM | |
| associated receptor | | | | | |
| AKT1 | FOS | LCK | NCK | PKCQ | |
| AKT2 | FYN | MAP2K1 | NFAT1 | PLCY1 | |
| | | (MEK1) | | | |
| AKT3 | GRAP2 | MAP2K2 | NFAT2 | PRF1 | |
| | (GADS) | (MEK2) | | (Perforin) | |
| ATF2 | GRB2 | MAP2K3 | NFKB1 | PTEN | |
| | | (MKK3) | | | |
| BCL10 | HLA- | MAP2K4 | NFKB2 | RAC1 | |
| | DRA | (MKK4) | | | |

[0777] In some embodiments, the antigen binding domain targets an antigen characteristic of an autoimmune or inflammatory disorder. In some embodiments, the autoimmune or inflammatory disorder is selected from chronic graft-vs-host disease (GVHD), lupus, arthritis, immune complex glomerulonephritis, goodpasture, uveitis, hepatitis, systemic sclerosis or scleroderma, type I diabetes, multiple sclerosis, cold agglutinin disease, Pemphigus vulgaris, Grave's disease, autoimmune hemolytic anemia, Hemophilia A, Primary Sjogren's Syndrome, thrombotic thrombocytopenia purrpura, neuromyelits optica, Evan's syndrome, IgM mediated neuropathy, cyroglobulinemia, dermatomyositis, idiopathic thrombocytopenia, ankylosing spondylitis, bullous pemphigoid, acquired angioedema, chronic urticarial, antiphospholipid demyelinating polyneuropathy, and autoimmune thrombocytopenia or neutropenia or pure red cell aplasias, while exemplary non-limiting examples of alloimmune diseases include allosensitization (see, for example, Blazar et al., 2015, Am. J. Transplant, 15(4):931-41) or xenosensitization from hematopoietic or solid organ transplantation, blood transfusions, pregnancy with fetal allosensitization, neonatal alloimmune thrombocytopenia, hemolytic disease of the newborn, sensitization to foreign antigens such as can occur with replacement of inherited or acquired deficiency disorders treated with enzyme or protein replacement therapy, blood products, and gene therapy. In some embodiments, the antigen characteristic of an autoimmune or inflammatory disorder is selected from an exemplary antigen listed in Table C3, or an antigenic fragment thereof. In some embodiments, the antigen binding domain targets citrullinated vimentin (e.g., associated with rheumatoid arthritis). In some embodiments, the antigen binding domain targets a human leukocyte antigen (HLA) (e.g., to induce transplant tolerance).

TABLE C3
Exemplary Autoimmune or Inflammatory Disorder Antigens

| | | | |
|---|---|---|---|
| a cell surface | a G protein- | receptor-like | histidine kinase |
| receptor | coupled | tyrosine | associated |
| | receptor | phosphatase | receptor |
| an ion channel- | receptor tyrosine | receptor serine/ | citrullinated |
| linked receptor | kinase | threonine kinase | vimentin |
| an enzyme- | tyrosine kinase | receptor guanylyl | Human |
| linked | associated | cyclase | leukocyte |
| receptor | receptor | | antigen (HLA) |

[0778] In some embodiments, a CAR antigen binding domain binds to a ligand expressed on B cells, plasma cells, plasmablasts. In some embodiments, the antigen expressed on B cells, plasma cells, or plasmablasts is selected from an exemplary antigen listed in Table C4, or an antigenic fragment thereof. In some embodiments, the B cell antigen is BCMA. In some embodiments, the B cell antigen is GPRC5D. In some embodiments, the B cell antigen is CD20. In some embodiments, a CAR that binds to an antigen listed in Table C4 is utilized to deplete B cells (e.g., autoreactive B cells producing autoantibodies) to induce immune tolerance.

TABLE C4
Exemplary B cell, Plasma Cell, and Plasmablast Antigens

| | | | | |
|---|---|---|---|---|
| CD10 | CD24 | CD138 | TNF | LFA-1 |
| CD19 | CD27 | CD319 | interferon | CD3 gamma |
| | | | receptors | |
| CD20 | CD38 | BCMA | GM-CSF | CD5 |
| CD22 | CD45R | CD28 | ZAP-70 | CD2 |
| GPRC5D | | | | |

[0779] In some embodiments, the antigen binding domain targets an antigen characteristic of an infectious disease. In some embodiments, wherein the infectious disease is selected from HIV, hepatitis B virus, hepatitis C virus, Human herpes virus, Human herpes virus 8 (HHV-8, Kaposi sarcoma-associated herpes virus (KSHV)), Human T-lymphotrophic virus-1 (HTLV-1), Merkel cell polyomavirus (MCV), Simian virus 40 (SV40), Epstein-Barr virus, CMV, human papillomavirus. In some embodiments, the antigen characteristic of an infectious disease is selected from an exemplary antigen listed in Table C5, or an antigenic fragment thereof.

TABLE C5
Exemplary Infectious Disease Antigens

| | |
|---|---|
| a cell surface receptor | receptor serine/threonine kinase |
| an ion channel-linked receptor | receptor guanylyl cyclase |
| an enzyme-linked receptor | histidine kinase associated receptor |
| a G protein-coupled receptor | HIV Env |
| receptor tyrosine kinase | gpl20 |
| tyrosine kinase associated receptor | CD4-induced epitope on HIV-1 |
| | Env. |
| receptor-like tyrosine phosphatase | |

[0780] Optionally, in some embodiments, the antigen binding domain further comprises a signal peptide. An amino acid sequence of an exemplary signal peptide is MALPVTALLLPLALLLHAARP (SEQ ID NO: 15542), which may be encoded by an exemplary nucleic acid sequence of

(SEQ ID NO: 15543)
ATGGCTCTGCCGGTGACCGCCCTGCTTCTGCCTCTTGCCCTGCTCTTGC
ATGCCGCTCGCCCG
or
(SEQ ID NO: 15544)
ATGGCTCTGCCCGTCACCGCTCTGCTGCTGCCTCTGGCTCTGCTGCTGC
ACGCTGCTCGCCCT.

### Transmembrane Domain

[0781] In some embodiments, the CAR transmembrane domain comprises at least a transmembrane region of an exemplary transmembrane domain listed in Table C6, or a functional fragment thereof.

TABLE C6
Exemplary Transmembrane Domains

| | | | | |
|---|---|---|---|---|
| alpha chain of the | CD22 | 4- | TCRα | CD80 |
| T cell receptor | | 1BB/CD137 | | |
| beta chain of the | CD33 | CD28 | TCRβ | CD86 |
| T cell receptor | | | | |
| zeta chain of the | CD37 | CD34 | TCRζ | CD40 |
| T-cell receptor | | | | |
| CD28 | CD64 | CD4 | CD32 | CD40L/CD154 |
| CD3 epsilon | CD80 | FcεRIγ | CD64 | VEGFR2 |
| CD45 | CD86 | CD16 | CD64 | FAS |
| CD4 | CD134 | OX40/CD134 | CD45 | FGFR2B |
| CD5 | CD137 | CD3ζ | CD5 | |
| CD8 | CD154 | CD3ε | CD9 | |
| CD9 | CD8α | CD3γ | CD22 | |
| CD16 | CD8β | CD3δ | CD37 | |

[0782] In some embodiments, the transmembrane domain is a CD8 transmembrane domain. In some embodiments, the CD8 transmembrane domain has an amino acid sequence of a CD8 transmembrane domain listed in Table C6A, or sequence having at least 75%, 8000, 8500, 9000, 95%, 960%, 9700, 980%, or 9900 identity thereto. In some embodiments, the CD8 transmembrane domain is encoded by a nucleic acid sequence of a CD8 transmembrane domain listed in Table C6A, or sequence having at least 75%, 80%, 85%, 90%, 95%, 96%, 97%, 98%, or 99% identity thereto.

TABLE C6A
Sequences of Exemplary Transmembrane Domains

| | | SEQ ID |
|---|---|---|
| Name | Sequence | NO: |
| CD8 | IYIWAPLAGTCGVLLLSLVITLYC | 1102 |
| transmembrane | | |
| (amino acid) | | |
| CD8 | ATCTACATCTGGGCGCCCTTGGCCGGGACTTGTGGGG | 15474 |
| transmembrane | TCCTTCTCCTGTCACTGGTTATCACCCTTTACTGC | |
| (nucleic acid) | | |
| CD8 | ATCTACATTTGGGCCCCTCTGGCTGGTACTTGCGGGG | 15475 |
| transmembrane | TCCTGCTGCTTTCACTCGTGATCACTCTTTACTGT | |
| (nucleic acid) | | |
| CD8 | IYIWAPLAGTCGVLLLSLVITLYCNHRN | 15476 |
| transmembrane | | |
| (amino acid) | | |
| CD8 | ATCTACATCTGGGCCCCTCTGGCCGGCACCTGTGGCG | 15477 |
| transmembrane | TGCTGCTGCTGAGCCTGGTGATCACCCTGTACTGCAA | |
| (nucleic acid) | CCACCGGAAC | |
| CD8α | IYIWAPLAGTCGVLLLSLVITYC | 15554 |
| transmembrane | | |
| domain (amino | | |
| acid) | | |

### Intracellular Signaling Domains

[0783] In some embodiments, the CAR comprises at least one signaling domain selected from one or more intracellular signaling domains listed in Table C7, or a functional fragment thereof. In some embodiments, the CAR comprises a first intracellular signaling domain and a second intracellular signaling domain. In some embodiments, the first intracellular signaling domain mediates downstream signaling during T-cell activation. In some embodiments, the second intracellular signaling domain is a costimulatory domain.

TABLE C7
Exemplary Intracellular Signaling Domains

| | | | |
|---|---|---|---|
| B7-1/CD80 | 4-1BB Ligand/TNFSF9 | RELT/TNFRSF19L | CD7 |
| B7-2/CD86 | BAFF/BLyS/TNFSF13B | TACI/TNFRSF13B | CD53 |
| B7-H1/PD-L1 | BAFF R/TNFRSF13C | TL1A/TNFSF15 | CD82/Kai-1 |
| B7-H2 | CD27/TNFRSF7 | TNF-alpha | CD90/Thy 1 |
| B7-H3 | CD27 Ligand/TNFSF7 | TNF RII/TNFRSF1B | CD96 |
| B7-H4 | CD30/TNFRSF8 | 2B4/CD244/SLAMF4 | CD160 |
| B7-H6 | CD30 Ligand/TNFSF8 | BLAME/SLAMF8 | CD200 |
| B7-H7 | CD40/TNFRSF5 | CD2 | CD300a/LMIR1 |
| BTLA/CD272 | CD40/TNFSF5 | CD2F-10/SLAMF9 | HLA Class I |
| CD28 | CD40 Ligand/TNFSF5 | CD48/SLAMF2 | HLA-DR |
| CTLA-4 | DR3/TNFRSF25 | CD58/LFA-3 | Ikaros |
| Gi24/VISTA/B7-H5 | GITR/TNFRSF18 | CD84/SLAMF5 | Integrin alpha |
| | | | 4/CD49d |
| ICOS/CD278 | GITR Ligand/TNFSF18 | CD229/SLAMF3 | Integrin alpha 4 beta |
| | | | 1 |
| PD-1 | HVEM/TNFRSF14 | CRACC/SLAMF7 | Integrin alpha 4 beta |
| | | | 7/LPAM-1 |
| PD-L2/B7-DC | LIGHT/TNFSF14 | NTB-A/SLAMF6 | LAG-3 |
| PDCD6 | Lymphotoxin- | SLAM/CD150 | TCL1A |
| | alpha/TNF-beta | | |
| 4- | OX40/TNFRSF4 | CD2 | TCL1B |
| 1BB/TNFSF9/CD137 | | | |
| CRTAM | CD30 | TIM-1/KIM- | CD2 |
| | | 1/HAVCR | |
| DAP12 | CD40 | TIM-4 | CD7 |
| Dectin-1/CLEC7A | PD-1 | TSLP | LIGHT |
| DPPIV/CD26 | ICOS | TSLP R | NKG2C |
| EphB6 | lymphocyte function- | lymphocyte function | B7-H3 |
| | associated antigen-1 | associated antigen-1 | |
| | (LFA-1) | (LFA-1) | |
| NKG2C | a ligand that specifically | a CD3 zeta domain | an immunoreceptor |
| | binds with CD83 | | tyrosine-based |
| | | | activation motif |
| | | | (ITAM) |
| CD27 | CD28 | 4-1BB | CD134/OX40 |

[0784] In some embodiments, the CAR comprises a (i) a CD3 zeta domain, or an immunoreceptor tyrosine-based activation motif (ITAM), or functional variant thereof, (ii) a CD28 domain or functional variant thereof, and (iii) a 4-1BB domain, or a CD134 domain, or functional variant thereof. In some embodiments, the CAR comprises a CD3 zeta domain or an immunoreceptor tyrosine-based activation motif (ITAM), or functional variant thereof. In some embodiments, the CAR comprises (i) a CD3 zeta domain, or an immunoreceptor tyrosine-based activation motif (ITAM), or functional variant thereof, (ii) a CD28 domain, or a 4-1BB domain, or functional variant thereof, and/or (iii) a 4-1BB domain, or a CD134 domain, or functional variant thereof. In some embodiments, the CAR comprises a (i) a CD3 zeta domain, or an immunoreceptor tyrosine-based activation motif (ITAM), or functional variant thereof, (ii) a CD28 domain or functional variant thereof, (iii) a 4-1BB domain, or a CD 134 domain, or functional variant thereof, and (iv) a cytokine or costimulatory ligand transgene.

[0785] In some embodiments, the CAR comprises a CD28 co-stimulatory domain.

[0786] In some embodiments, the CAR comprises a CD3z signaling domain.

[0787] In some embodiments, intracellular signaling domain comprises an intracellular signaling domain listed in Table C7A, or sequence having at least 75, 80, 85, 900, 95%, 960, 970, 98%, or 99% identity thereto. In some embodiments, intracellular signaling domain is encoded by a nucleic acid sequence of an intracellular signaling domain listed in Table C7A, or sequence having at least 75%, 80%, 85%, 90%, 95%, 96%, 97%, 98%, or 99%, identity thereto.

TABLE C7A
Sequences of Exemplary Intracellular Signaling Domains

| | | SEQ ID |
|---|---|---|
| Name | Sequence | NO: |
| CD28 signaling | RSKRSRLLHSDYMNMTPRRPGPTRKHYQPYAPPRDFAA | 1103 |
| domain (amino | YRS | |
| acid) | | |
| CD28 signaling | AGGAGTAAGAGGAGCAGGCTCCTGCACAGTGACTAC | 15446 |
| domain (nucleic | ATGAACATGACTCCCCGCCGCCCCGGGCCCACCCGCA | |
| acid) | AGCATTACCAGCCCTATGCCCCACCACGCGACTTCGC | |
| | AGCCTATCGCTCC | |
| CD3z signaling | RVKFSRSADAPAYQQGQNQLYNELNLGRREEYDVLDK | 1104 |
| domain (amino | RRGRDPEMGGKPRRKNPQEGLYNELQKDKMAEAYSEI | |
| acid) | GMKGERRRGKGHDGLYQGLSTATKDTYDALHMQALP | |
| | PR | |
| CD3z signaling | AGAGTGAAGTTCAGCAGATCCGCCGACGCCCCTGCCT | 15478 |
| domain (nucleic | ACCAGCAGGGACAGAACCAGCTGTACAACGAGCTGA | |
| acid) | ACCTGGGCAGACGGGAAGAGTACGACGTGCTGGACA | |
| | AGCGGAGAGGCCGGGACCCCGAGATGGGCGGAAAG | |
| | CCCAGACGGAAGAACCCCCAGGAAGGCCTGTATAAC | |
| | GAACTGCAGAAAGACAAGATGGCCGAGGCCTACAGC | |
| | GAGATCGGCATGAAGGGCGAGCGGAGGCGCGGCAA | |
| | GGGCCACGATGGCCTGTACCAGGGCCTGAGCACCGC | |
| | CACCAAGGACACCTACGACGCCCTGCACATGCAGGC | |
| | CCTGCCCCCCAGA | |
| CD3z signaling | AGAGTGAAGTTCAGCAGGAGCGCAGACGCCCCCGCG | 15479 |
| domain (nucleic | TACCAGCAGGGCCAGAACCAGCTCTATAACGAGCTC | |
| acid) | AATCTAGGACGAAGAGAGGAGTACGATGTTTTGGAC | |
| | AAGAGACGTGGCCGGGACCCTGAGATGGGGGGAAAG | |
| | CCGAGAAGGAAGAACCCTCAGGAAGGCCTGTACAAT | |
| | GAACTGCAGAAAGATAAGATGGCGGAGGCCTACAGT | |
| | GAGATTGGGATGAAAGGCGAGCGCCGGAGGGGCAA | |
| | GGGGCACGATGGCCTTTACCAGGGTCTCAGTACAGCC | |
| | ACCAAGGACACCTACGACGCCCTTCACATGCAGGCC | |
| | CTGCCCCCTCGC | |
| 4-1BB signaling | KRGRKKLLYIFKQPFMRPVQTTQEEDGCSCRFPEEEEGG | 15480 |
| domain (amino | CEL | |
| acid) | | |
| 4-1BB signaling | AAACGGGGCAGAAAGAAACTCCTGTATATATTCAAA | 15481 |
| domain (nucleic | | |
| acid) | CAACCATTTATGAGACCAGTACAAACTACTCAAGAG | |
| | GAAGATGGCTGTAGCTGCCGATTTCCAGAAGAAGAA | |
| | GAAGGAGGATGTGAACTG | |

[0788] In some embodiments, the CAR further comprises one or more spacers, e.g., wherein the spacer is a first spacer between the antigen binding domain and the transmembrane domain. In some embodiments, the first spacer includes at least a portion of an immunoglobulin constant region or variant or modified version thereof. In some embodiments, the spacer is a second spacer between the transmembrane domain and a signaling domain. In some embodiments, the second spacer is an oligopeptide, e.g., wherein the oligopeptide comprises glycine-serine doublets. In some embodiments, the CAR further comprises a hinge domain. In some embodiments, the hinge domain is a CD8 hinge domain. In some embodiments, the CD8 hinge domain has an amino acid sequence of a CD8 hinge domain in Table C8, or sequence having at least 75%, 80%, 85%, 90%, 95%, 96%, 97%, 98%, or 99% identity thereto. In some embodiments, the CD38 hinge domain is encoded by a nucleic sequence listed in Table C8, or sequence having at least 75%, 80%, 85%, 90%, 95%, 96%, 97%, 98%, or 99% identity thereto.

TABLE C8
Sequence of Exemplary Hinge Domains

| | | SEQ ID |
|---|---|---|
| Name | Sequence | NO: |
| CD8 Hinge | TTTPAPRPPTPAPTIASQPLSLRPEACRPAAGGAVHTRGL | 1101 |
| (amino acid) | DFACD | |
| CD8 Hinge | ACCACGACGCCAGCGCCGCGACCACCAACACCGGCG | 15482 |
| (nucleic acid) | CCCACCATCGCGTCGCAGCCCCTGTCCCTGCGCCCAG | |
| | AGGCGTGCCGGCCAGCGGCGGGGGGCGCAGTGCACA | |
| | CGAGGGGGCTGGACTTCGCCTGTGAT | |
| CD8 Hinge | ACCACTACCCCAGCACCGAGGCCACCCACCCCGGCTC | 15483 |
| (nucleic acid) | CTACCATCGCCTCCCAGCCTCTGTCCCTGCGTCCGGA | |
| | GGCATGTAGACCCGCAGCTGGTGGGGCCGTGCATAC | |
| | CCGGGGTCTTGACTTCGCCTGCGAT | |
| CD8 Hinge | FVPVFLPAKPTTTPAPRPPTPAPTIASQPLSLRPEACRPAA | 15484 |
| (amino acid) | GGAVHTRGLDFACD | |
| CD8 Hinge | TTCGTGCCCGTGTTCCTGCCCGCCAAACCTACCACCA | 15485 |
| (nucleic acid) | CCCCTGCCCCTAGACCTCCCACCCCAGCCCCAACAAT | |
| | CGCCAGCCAGCCTCTGTCTCTGCGGCCCGAAGCCTGT | |
| | AGACCTGCTGCCGGCGGAGCCGTGCACACCAGAGGC | |
| | CTGGACTTCGCCTGCGAC | |

[0789] In some embodiments, the CAR comprises a sequence of a CAR listed in Table C9, or sequence having at least 75%, 80%, 85%, 90%, 95%, 96%, 97%, 98%, or 99% identity thereto. In some embodiments, the CAR is encoded by a nucleic acid sequence listed in Table C9, or sequence having at least 75%, 80%, 85%, 90%, 95%, 96%, 97%, 98%, or 99%, identity thereto.

TABLE C9
Sequences of Exemplary CAR Molecules

| | | |
|---|---|---|
| | | SEQ ID |
| Description | Sequence | NO |

BCMA CAR 1

| | | |
|---|---|---|
| BCMA CAR1 | DIQMTQSPSSLSASVGDRVTITCRASQSISSYLNWYQQKPGK | 15486 |
| VL | APKLLIYAASSLQSGVPSRFSGSGSGTDFTLTISSLQPEDFATY | |
| (amino acid) | YCQQKYDLLTFGGGTKVEIK | |
| BCMA CAR1 | GACATCCAGATGACCCAGTCTCCATCCTCCCTGTCTGCATC | 15487 |
| VL | TGTAGGAGACAGAGTCACCATCACTTGCCGGGCAAGTCAG | |
| (nucleic acid) | AGCATTAGCAGCTATTTAAATTGGTATCAGCAGAAACCAG | |
| | GGAAAGCCCCTAAGCTCCTGATCTATGCTGCATCCAGTTT | |
| | GCAAAGTGGGGTCCCATCAAGGTTCAGTGGCAGTGGATCT | |
| | GGGACAGATTTCACTCTCACCATCAGCAGTCTGCAACCTG | |
| | AAGATTTTGCAACTTACTACTGTCAGCAAAAATACGACCT | |
| | CCTCACTTTTGGCGGAGGGACCAAGGTTGAGATCAAA | |
| BCMA CAR1 | QLQLQESGPGLVKPSETLSLTCTVSGGSISSSSYYWGWIRQPP | 15488 |
| VH | GKGLEWIGSISYSGSTYYNPSLKSRVTISVDTSKNQFSLKLSS | |
| (amino acid) | VTAADTAVYYCARDRGDTILDVWGQGTMVTVSS | |
| BCMA CAR1 | CAGCTGCAGCTGCAGGAGTCGGGCCCAGGACTGGTGAAG | 15489 |
| VH | CCTTCGGAGACCCTGTCCCTCACCTGCACTGTCTCTGGTGG | |
| (nucleic acid) | CTCCATCAGCAGTAGTAGTTACTACTGGGGCTGGATCCGC | |
| | CAGCCCCCAGGGAAGGGGCTGGAGTGGATTGGGAGTATC | |
| | TCCTATAGTGGGAGCACCTACTACAACCCGTCCCTCAAGA | |
| | GTCGAGTCACCATATCCGTAGACACGTCCAAGAACCAGTT | |
| | CTCCCTGAAGCTGAGTTCTGTGACCGCCGCAGACACGGCG | |
| | GTGTACTACTGCGCCAGAGATCGTGGAGACACCATACTAG | |
| | ACGTATGGGGTCAGGGTACAATGGTCACCGTCAGCTCA | |
| BCMA CAR1 | DIQMTQSPSSLSASVGDRVTITCRASQSISSYLNWYQQKPGK | 15490 |
| Full CAR (no | APKLLIYAASSLQSGVPSRFSGSGSGTDFTLTISSLQPEDFATY | |
| signal peptide) | YCQQKYDLLTFGGGTKVEIKGSTSGSGKPGSGEGSTKGQLQ | |
| (amino acid) | LQESGPGLVKPSETLSLTCTVSGGSISSSSYYWGWIRQPPGKG | |
| | LEWIGSISYSGSTYYNPSLKSRVTISVDTSKNQFSLKLSSVTA | |
| | ADTAVYYCARDRGDTILDVWGQGTMVTVSSFVPVFLPAKPT | |
| | TTPAPRPPTPAPTIASQPLSLRPEACRPAAGGAVHTRGLDFAC | |
| | DIYIWAPLAGTCGVLLLSLVITLYCNHRNKRGRKKLLYIFKQ | |
| | PFMRPVQTTQEEDGCSCRFPEEEEGGCELRVKFSRSADAPAY | |
| | QQGQNQLYNELNLGRREEYDVLDKRRGRDPEMGGKPRRKN | |
| | PQEGLYNELQKDKMAEAYSEIGMKGERRRGKGHDGLYQGL | |
| | STATKDTYDALHMQALPPR | |
| BCMA CAR1 | GACATCCAGATGACCCAGTCTCCATCCTCCCTGTCTGCATC | 15491 |
| Full CAR (no | TGTAGGAGACAGAGTCACCATCACTTGCCGGGCAAGTCAG | |
| signal peptide) | AGCATTAGCAGCTATTTAAATTGGTATCAGCAGAAACCAG | |
| (nucleic acid) | GGAAAGCCCCTAAGCTCCTGATCTATGCTGCATCCAGTTT | |
| | GCAAAGTGGGGTCCCATCAAGGTTCAGTGGCAGTGGATCT | |
| | GGGACAGATTTCACTCTCACCATCAGCAGTCTGCAACCTG | |
| | AAGATTTTGCAACTTACTACTGTCAGCAAAAATACGACCT | |
| | CCTCACTTTTGGCGGAGGGACCAAGGTTGAGATCAAAGGC | |
| | AGCACCAGCGGCTCCGGCAAGCCTGGCTCTGGCGAGGGC | |
| | AGCACAAAGGGACAGCTGCAGCTGCAGGAGTCGGGCCCA | |
| | GGACTGGTGAAGCCTTCGGAGACCCTGTCCCTCACCTGCA | |
| | CTGTCTCTGGTGGCTCCATCAGCAGTAGTAGTTACTACTG | |
| | GGGCTGGATCCGCCAGCCCCCAGGGAAGGGGCTGGAGTG | |
| | GATTGGGAGTATCTCCTATAGTGGGAGCACCTACTACAAC | |
| | CCGTCCCTCAAGAGTCGAGTCACCATATCCGTAGACACGT | |
| | CCAAGAACCAGTTCTCCCTGAAGCTGAGTTCTGTGACCGC | |
| | CGCAGACACGGCGGTGTACTACTGCGCCAGAGATCGTGG | |
| | AGACACCATACTAGACGTATGGGGTCAGGGTACAATGGTC | |
| | ACCGTCAGCTCATTCGTGCCCGTGTTCCTGCCCGCCAAAC | |
| | CTACCACCACCCCTGCCCCTAGACCTCCCACCCCAGCCCC | |
| | AACAATCGCCAGCCAGCCTCTGTCTCTGCGGCCCGAAGCC | |
| | TGTAGACCTGCTGCCGGCGGAGCCGTGCACACCAGAGGCC | |
| | TGGACTTCGCCTGCGACATCTACATCTGGGCCCCTCTGGC | |
| | CGGCACCTGTGGCGTGCTGCTGCTGAGCCTGGTGATCACC | |
| | CTGTACTGCAACCACCGGAACAAACGGGGCAGAAAGAAA | |
| | CTCCTGTATATATTCAAACAACCATTTATGAGACCAGTAC | |
| | AAACTACTCAAGAGGAAGATGGCTGTAGCTGCCGATTTCC | |
| | AGAAGAAGAAGAAGGAGGATGTGAACTGAGAGTGAAGTT | |
| | CAGCAGATCCGCCGACGCCCCTGCCTACCAGCAGGGACA | |
| | GAACCAGCTGTACAACGAGCTGAACCTGGGCAGACGGGA | |
| | AGAGTACGACGTGCTGGACAAGCGGAGAGGCCGGGACCC | |
| | CGAGATGGGCGGAAAGCCCAGACGGAAGAACCCCCAGGA | |
| | AGGCCTGTATAACGAACTGCAGAAAGACAAGATGGCCGA | |
| | GGCCTACAGCGAGATCGGCATGAAGGGCGAGCGGAGGCG | |
| | CGGCAAGGGCCACGATGGCCTGTACCAGGGCCTGAGCAC | |
| | CGCCACCAAGGACACCTACGACGCCCTGCACATGCAGGCC | |
| | CTGCCCCCCAGA | |
| BCMA CAR1 | MALPVTALLLPLALLLHAARPDIQMTQSPSSLSASVGDRVTIT | 15492 |
| Full CAR (with | CRASQSISSYLNWYQQKPGKAPKLLIYAASSLQSGVPSRFSGS | |
| signal peptide) | GSGTDFTLTISSLQPEDFATYYCQQKYDLLTFGGGTKVEIKGS | |
| (amino acid) | TSGSGKPGSGEGSTKGQLQLQESGPGLVKPSETLSLTCTVSG | |
| | GSISSSSYYWGWIRQPPGKGLEWIGSISYSGSTYYNPSLKSRV | |
| | TISVDTSKNQFSLKLSSVTAADTAVYYCARDRGDTILDVWG | |
| | QGTMVTVSSFVPVFLPAKPTTTPAPRPPTPAPTIASQPLSLRPE | |
| | ACRPAAGGAVHTRGLDFACDIYIWAPLAGTCGVLLLSLVITL | |
| | YCNHRNKRGRKKLLYIFKQPFMRPVQTTQEEDGCSCRFPEEE | |
| | EGGCELRVKFSRSADAPAYQQGQNQLYNELNLGRREEYDVL | |
| | DKRRGRDPEMGGKPRRKNPQEGLYNELQKDKMAEAYSEIG | |
| | [sequence omitted] | |
| BCMA CAR1 | ATGGCTCTGCCGGTGACCGCCCTGCTTCTGCCTCTTGCCCT | 15493 |
| Full CAR (with | GCTCTTGCATGCCGCTCGCCCGGACATCCAGATGACCCAG | |
| signal peptide) | TCTCCATCCTCCCTGTCTGCATCTGTAGGAGACAGAGTCA | |
| (nucleic acid) | CCATCACTTGCCGGGCAAGTCAGAGCATTAGCAGCTATTT | |
| | AAATTGGTATCAGCAGAAACCAGGGAAAGCCCCTAAGCT | |
| | CCTGATCTATGCTGCATCCAGTTTGCAAAGTGGGGTCCCA | |
| | TCAAGGTTCAGTGGCAGTGGATCTGGGACAGATTTCACTC | |
| | TCACCATCAGCAGTCTGCAACCTGAAGATTTTGCAACTTA | |
| | CTACTGTCAGCAAAAATACGACCTCCTCACTTTTGGCGGA | |
| | GGGACCAAGGTTGAGATCAAAGGCAGCACCAGCGGCTCC | |
| | GGCAAGCCTGGCTCTGGCGAGGGCAGCACAAAGGGACAG | |
| | CTGCAGCTGCAGGAGTCGGGCCCAGGACTGGTGAAGCCTT | |
| | CGGAGACCCTGTCCCTCACCTGCACTGTCTCTGGTGGCTCC | |
| | ATCAGCAGTAGTAGTTACTACTGGGGCTGGATCCGCCAGC | |
| | CCCCAGGGAAGGGGCTGGAGTGGATTGGGAGTATCTCCTA | |
| | TAGTGGGAGCACCTACTACAACCCGTCCCTCAAGAGTCGA | |
| | GTCACCATATCCGTAGACACGTCCAAGAACCAGTTCTCCC | |
| | TGAAGCTGAGTTCTGTGACCGCCGCAGACACGGCGGTGTA | |
| | CTACTGCGCCAGAGATCGTGGAGACACCATACTAGACGTA | |
| | TGGGGTCAGGGTACAATGGTCACCGTCAGCTCATTCGTGC | |
| | CCGTGTTCCTGCCCGCCAAACCTACCACCACCCCTGCCCCT | |
| | AGACCTCCCACCCCAGCCCCAACAATCGCCAGCCAGCCTC | |
| | TGTCTCTGCGGCCCGAAGCCTGTAGACCTGCTGCCGGCGG | |
| | AGCCGTGCACACCAGAGGCCTGGACTTCGCCTGCGACATC | |
| | TACATCTGGGCCCCTCTGGCCGGCACCTGTGGCGTGCTGC | |
| | TGCTGAGCCTGGTGATCACCCTGTACTGCAACCACCGGAA | |
| | CAAACGGGGCAGAAAGAAACTCCTGTATATATTCAAACA | |
| | ACCATTTATGAGACCAGTACAAACTACTCAAGAGGAAGAT | |
| | GGCTGTAGCTGCCGATTTCCAGAAGAAGAAGAAGGAGGA | |
| | TGTGAACTGAGAGTGAAGTTCAGCAGATCCGCCGACGCCC | |
| | CTGCCTACCAGCAGGGACAGAACCAGCTGTACAACGAGC | |
| | TGAACCTGGGCAGACGGGAAGAGTACGACGTGCTGGACA | |
| | AGCGGAGAGGCCGGGACCCCGAGATGGGCGGAAAGCCCA | |
| | GACGGAAGAACCCCCAGGAAGGCCTGTATAACGAACTGC | |
| | AGAAAGACAAGATGGCCGAGGCCTACAGCGAGATCGGCA | |
| | TGAAGGGCGAGCGGAGGCGCGGCAAGGGCCACGATGGCC | |
| | TGTACCAGGGCCTGAGCACCGCCACCAAGGACACCTACG | |
| | ACGCCCTGCACATGCAGGCCCTGCCCCCCAGA | |

BCMA CAR2

| | | |
|---|---|---|
| BCMA CAR2 | QVKLEESGGGLVQAGRSLRLSCAASEHTFSSHVMGWFRQAP | 15494 |
| VHH1 (amino | GKERESVAVIGWRDISTSYADSVKGRFTISRDNAKKTLYLQM | |
| acid) | NSLKPEDTAVYYCAARRIDAADFDSWGQGTQVTVSS | |
| BCMA CAR2 | CAGGTCAAACTGGAAGAATCTGGCGGAGGCCTGGTGCAGG | 15495 |
| VHH1 (nucleic | CAGGACGGAGCCTGCGCCTGAGCTGCGCAGCATCCGAGCA | |
| acid) | CACCTTCAGCTCCCACGTGATGGGCTGGTTTCGGCAGGCCC | |
| | CAGGCAAGGAGAGAGAGAGCGTGGCCGTGATCGGCTGGA | |
| | GGGACATCTCCACATCTTACGCCGATTCCGTGAAGGGCCG | |
| | GTTCACCATCAGCCGGGACAACGCCAAGAAGACACTGTAT | |
| | CTGCAGATGAACAGCCTGAAGCCCGAGGACACCGCCGTGT | |
| | ACTATTGCGCAGCAAGGAGAATCGACGCAGCAGACTTTGA | |
| | TTCCTGGGGCCAGGGCACCCAGGTGACAGTGTCTAGC | |
| BCMA CAR2 | EVQLVESGGGLVQAGGSLRLSCAASGRTFTMGWFRQAPGKE | 15496 |
| VHH2 (amino | REFVAAISLSPTLAYYAESVKGRFTISRDNAKNTVVLQMNSLK | |
| acid) | PEDTALYYCAADRKSVMSIRPDYWGQGTQVTVSS | |
| BCMA CAR2 | GAGGTGCAGCTGGTGGAGAGCGGAGGCGGCCTGGTGCAGG | 15497 |
| VHH2 (nucleic | CCGGAGGCTCTCTGAGGCTGAGCTGTGCAGCATCCGGAAG | |
| acid) | AACCTTCACAATGGGCTGGTTTAGGCAGGCACCAGGAAAG | |
| | GAGAGGGAGTTCGTGGCAGCAATCAGCCTGTCCCCTACCC | |
| | TGGCCTACTATGCCGAGAGCGTGAAGGGCAGGTTTACCAT | |
| | CTCCCGCGATAACGCCAAGAATACAGTGGTGCTGCAGATG | |
| | AACTCCCTGAAACCTGAGGACACAGCCCTGTACTATTGTGC | |
| | CGCCGATCGGAAGAGCGTGATGAGCATTAGACCAGACTAT | |
| | TGGGGGCAGGGAACACAGGTGACCGTGAGCAGC | |
| BCMA CAR2 | QVKLEESGGGLVQAGRSLRLSCAASEHTFSSHVMGWFRQAP | 15498 |
| Full CAR (no | GKERESVAVIGWRDISTSYADSVKGRFTISRDNAKKTLYLQM | |
| signal peptide) | NSLKPEDTAVYYCAARRIDAADFDSWGQGTQVTVSSGGGGS | |
| (amino acid) | EVQLVESGGGLVQAGGSLRLSCAASGRTFTMGWFRQAPGKE | |
| | REFVAAISLSPTLAYYAESVKGRFTISRDNAKNTVVLQMNSLK | |
| | PEDTALYYCAADRKSVMSIRPDYWGQGTQVTVSSTTTPAPRP | |
| | PTPAPTIASQPLSLRPEACRPAAGGAVHTRGLDFACDIYIWAP | |
| | LAGTCGVLLLSLVITLYCKRGRKKLLYIFKQPFMRPVQTTQEE | |
| | DGCSCRFPEEEEGGCELRVKFSRSADAPAYQQGQNQLYNELN | |
| | LGRREEYDVLDKRRGRDPEMGGKPRRKNPQEGLYNELQKDK | |
| | MAEAYSEIGMKGERRRGKGHDGLYQGLSTATKDTYDALHM | |
| | QALPPR | |
| BCMA CAR2 | CAGGTCAAACTGGAAGAATCTGGCGGAGGCCTGGTGCAGG | 15499 |
| Full CAR (no | CAGGACGGAGCCTGCGCCTGAGCTGCGCAGCATCCGAGCA | |
| signal peptide) | CACCTTCAGCTCCCACGTGATGGGCTGGTTTCGGCAGGCCC | |
| (nucleic acid) | CAGGCAAGGAGAGAGAGAGCGTGGCCGTGATCGGCTGGA | |
| | GGGACATCTCCACATCTTACGCCGATTCCGTGAAGGGCCG | |
| | GTTCACCATCAGCCGGGACAACGCCAAGAAGACACTGTAT | |
| | CTGCAGATGAACAGCCTGAAGCCCGAGGACACCGCCGTGT | |
| | ACTATTGCGCAGCAAGGAGAATCGACGCAGCAGACTTTGA | |
| | TTCCTGGGGCCAGGGCACCCAGGTGACAGTGTCTAGCGGA | |
| | GGAGGAGGATCTGAGGTGCAGCTGGTGGAGAGCGGAGGC | |
| | GGCCTGGTGCAGGCCGGAGGCTCTCTGAGGCTGAGCTGTG | |
| | CAGCATCCGGAAGAACCTTCACAATGGGCTGGTTTAGGCA | |
| | GGCACCAGGAAAGGAGAGGGAGTTCGTGGCAGCAATCAG | |
| | CCTGTCCCCTACCCTGGCCTACTATGCCGAGAGCGTGAAGG | |
| | GCAGGTTTACCATCTCCCGCGATAACGCCAAGAATACAGT | |
| | GGTGCTGCAGATGAACTCCCTGAAACCTGAGGACACAGCC | |
| | CTGTACTATTGTGCCGCCGATCGGAAGAGCGTGATGAGCA | |
| | TTAGACCAGACTATTGGGGGCAGGGAACACAGGTGACCGT | |
| | GAGCAGCACCACGACGCCAGCGCCGCGACCACCAACACCG | |
| | GCGCCCACCATCGCGTCGCAGCCCCTGTCCCTGCGCCCAGA | |
| | GGCGTGCCGGCCAGCGGCGGGGGGCGCAGTGCACACGAG | |
| | GGGGCTGGACTTCGCCTGTGATATCTACATCTGGGCGCCCT | |
| | TGGCCGGGACTTGTGGGGTCCTTCTCCTGTCACTGGTTATC | |
| | ACCCTTTACTGCAAACGGGGCAGAAAGAAACTCCTGTATA | |
| | TATTCAAACAACCATTTATGAGACCAGTACAAACTACTCAA | |
| | GAGGAAGATGGCTGTAGCTGCCGATTTCCAGAAGAAGAAG | |
| | AAGGAGGATGTGAACTGAGAGTGAAGTTCAGCAGGAGCGC | |
| | AGACGCCCCCGCGTACCAGCAGGGCCAGAACCAGCTCTAT | |
| | AACGAGCTCAATCTAGGACGAAGAGAGGAGTACGATGTTT | |
| | TGGACAAGAGACGTGGCCGGGACCCTGAGATGGGGGGAA | |
| | AGCCGAGAAGGAAGAACCCTCAGGAAGGCCTGTACAATGA | |
| | ACTGCAGAAAGATAAGATGGCGGAGGCCTACAGTGAGATT | |
| | GGGATGAAAGGCGAGCGCCGGAGGGGCAAGGGGCACGAT | |
| | GGCCTTTACCAGGGTCTCAGTACAGCCACCAAGGACACCT | |
| | ACGACGCCCTTCACATGCAGGCCCTGCCCCCTCGCTAA | |
| BCMA CAR2 | MALPVTALLLPLALLLHAARPQVKLEESGGGLVQAGRSLRLS | 15500 |
| Full CAR (with | CAASEHTFSSHVMGWFRQAPGKERESVAVIGWRDISTSYADS | |
| signal peptide) | VKGRFTISRDNAKKTLYLQMNSLKPEDTAVYYCAARRIDAA | |
| (amino acid) | DFDSWGQGTQVTVSSGGGGSEVQLVESGGGLVQAGGSLRLS | |
| | CAASGRTFTMGWFRQAPGKEREFVAAISLSPTLAYYAESVKG | |
| | RFTISRDNAKNTVVLQMNSLKPEDTALYYCAADRKSVMSIRP | |
| | DYWGQGTQVTVSSTTTPAPRPPTPAPTIASQPLSLRPEACRPA | |
| | AGGAVHTRGLDFACDIYIWAPLAGTCGVLLLSLVITLYCKRG | |
| | RKKLLYIFKQPFMRPVQTTQEEDGCSCRFPEEEEGGCELRVKF | |
| | SRSADAPAYQQGQNQLYNELNLGRREEYDVLDKRRGRDPEM | |
| | GGKPRRKNPQEGLYNELQKDKMAEAYSEIGMKGERRRGKG | |
| | HDGLYQGLSTATKDTYDALHMQALPPR | |
| BCMA CAR2 | ATGGCTCTGCCCGTCACCGCTCTGCTGCTGCCTCTGGCTCT | 15501 |
| Full CAR (with | GCTGCTGCACGCTGCTCGCCCTCAGGTCAAACTGGAAGAA | |
| signal peptide) | TCTGGCGGAGGCCTGGTGCAGGCAGGACGGAGCCTGCGCC | |
| (nucleic acid) | TGAGCTGCGCAGCATCCGAGCACACCTTCAGCTCCCACGTG | |
| | ATGGGCTGGTTTCGGCAGGCCCCAGGCAAGGAGAGAGAGA | |
| | GCGTGGCCGTGATCGGCTGGAGGGACATCTCCACATCTTAC | |
| | GCCGATTCCGTGAAGGGCCGGTTCACCATCAGCCGGGACA | |
| | ACGCCAAGAAGACACTGTATCTGCAGATGAACAGCCTGAA | |
| | GCCCGAGGACACCGCCGTGTACTATTGCGCAGCAAGGAGA | |
| | ATCGACGCAGCAGACTTTGATTCCTGGGGCCAGGGCACCC | |
| | AGGTGACAGTGTCTAGCGGAGGAGGAGGATCTGAGGTGCA | |
| | GCTGGTGGAGAGCGGAGGCGGCCTGGTGCAGGCCGGAGGC | |
| | TCTCTGAGGCTGAGCTGTGCAGCATCCGGAAGAACCTTCAC | |
| | AATGGGCTGGTTTAGGCAGGCACCAGGAAAGGAGAGGGA | |
| | GTTCGTGGCAGCAATCAGCCTGTCCCCTACCCTGGCCTACT | |
| | ATGCCGAGAGCGTGAAGGGCAGGTTTACCATCTCCCGCGA | |
| | TAACGCCAAGAATACAGTGGTGCTGCAGATGAACTCCCTG | |
| | AAACCTGAGGACACAGCCCTGTACTATTGTGCCGCCGATC | |
| | GGAAGAGCGTGATGAGCATTAGACCAGACTATTGGGGGCA | |
| | GGGAACACAGGTGACCGTGAGCAGCACCACGACGCCAGCG | |
| | CCGCGACCACCAACACCGGCGCCCACCATCGCGTCGCAGC | |
| | CCCTGTCCCTGCGCCCAGAGGCGTGCCGGCCAGCGGCGGG | |
| | GGGCGCAGTGCACACGAGGGGGCTGGACTTCGCCTGTGAT | |
| | ATCTACATCTGGGCGCCCTTGGCCGGGACTTGTGGGGTCCT | |
| | TCTCCTGTCACTGGTTATCACCCTTTACTGCAAACGGGGCA | |
| | GAAAGAAACTCCTGTATATATTCAAACAACCATTTATGAG | |
| | ACCAGTACAAACTACTCAAGAGGAAGATGGCTGTAGCTGC | |
| | CGATTTCCAGAAGAAGAAGAAGGAGGATGTGAACTGAGA | |
| | GTGAAGTTCAGCAGGAGCGCAGACGCCCCCGCGTACCAGC | |
| | AGGGCCAGAACCAGCTCTATAACGAGCTCAATCTAGGACG | |
| | AAGAGAGGAGTACGATGTTTTGGACAAGAGACGTGGCCGG | |
| | GACCCTGAGATGGGGGGAAAGCCGAGAAGGAAGAACCCT | |
| | CAGGAAGGCCTGTACAATGAACTGCAGAAAGATAAGATGG | |
| | CGGAGGCCTACAGTGAGATTGGGATGAAAGGCGAGCGCCG | |
| | GAGGGGCAAGGGGCACGATGGCCTTTACCAGGGTCTCAGT | |
| | ACAGCCACCAAGGACACCTACGACGCCCTTCACATGCAGG | |
| | CCCTGCCCCCTCGCTAA | |

BCMA CAR3

| | | |
|---|---|---|
| BCMA CAR3 | MALPVTALLLPLALLLHAARPDIVLTQSPPSLAMSLGKRATIS | 15502 |
| scFv (amino | CRASESVTILGSHLIHWYQQKPGQPPTLLIQLASNVQTGVPAR | |
| acid) | FSGSGSRTDFTLTIDPVEEDDVAVYYCLQSRTIPRTFGGGTKLE | |
| | IKGSTSGSGKPGSGEGSTKGQIQLVQSGPELKKPGETVKISCK | |
| | ASGYTFTDYSINWVKRAPGKGLKWMGWINTETREPAYAYDF | |
| | RGRFAFSLETSASTAYLQINNLKYEDTATYFCALDYSYAMDY | |
| | WGQGTSVTVSS | |

BCMA CAR4

| | | |
|---|---|---|
| BCMA CAR4 | MALPVTALLLPLALLLHAARPDIVLTQSPPSLAMSLGKRATIS | 15503 |
| Full CAR | CRASESVTILGSHLIHWYQQKPGQPPTLLIQLASNVQTGVPAR | |
| (amino acid) | FSGSGSRTDFTLTIDPVEEDDVAVYYCLQSRTIPRTFGGGTKLE | |
| | IKGSTSGSGKPGSGEGSTKGQIQLVQSGPELKKPGETVKISCK | |
| | ASGYTFTDYSINWVKRAPGKGLKWMGWINTETREPAYAYDF | |
| | RGRFAFSLETSASTAYLQINNLKYEDTATYFCALDYSYAMDY | |
| | WGQGTSVTVSSFVPVFLPAKPTTTPAPRPPTPAPTIASQPLSLR | |
| | PEACRPAAGGAVHTRGLDFACDIYIWAPLAGTCGVLLLSLVIT | |
| | LYCNHRNKRGRKKLLYIFKQPFMRPVQTTQEEDGCSCRFPEE | |
| | EEGGCELRVKFSRSADAPAYQQGQNQLYNELNLGRREEYDV | |
| | LDKRRGRDPEMGGKPRRKNPQEGLYNELQKDKMAEAYSEIG | |
| | [sequence omitted] | |
| BCMA CAR4 | ATGGCTCTGCCTGTGACAGCTCTGCTGCTGCCTCTGGCCCT | 15504 |
| Full CAR | GCTGCTGCATGCCGCCAGACCTGATATCGTGCTGACCCAGA | |
| (nucleic acid) | GCCCTCCCAGCCTGGCCATGTCTCTGGGCAAGAGAGCCAC | |
| | CATCAGCTGCAGAGCCAGCGAGAGCGTGACCATCCTGGGC | |
| | AGCCACCTGATCCACTGGTATCAGCAGAAGCCCGGCCAGC | |
| | CCCCTACCCTGCTGATTCAGCTGGCCTCCAATGTGCAGACC | |
| | GGCGTGCCAGCCAGATTTTCCGGCAGCGGCAGCAGAACCG | |
| | ACTTCACCCTGACCATCGACCCCGTGGAAGAGGACGACGT | |
| | GGCCGTGTACTACTGCCTGCAGAGCAGAACCATCCCCCGG | |
| | ACCTTTGGCGGAGGCACCAAGCTGGAAATCAAGGGCAGCA | |
| | CCAGCGGCTCCGGCAAGCCTGGATCTGGCGAGGGATCTAC | |
| | CAAGGGACAGATCCAGCTGGTGCAGAGCGGCCCTGAGCTG | |
| | AAGAAACCCGGCGAGACAGTGAAGATCTCCTGCAAGGCCA | |
| | GCGGCTACACCTTCACCGACTACAGCATCAACTGGGTCAA | |
| | GAGGGCCCCTGGCAAGGGCCTGAAGTGGATGGGCTGGATC | |
| | AACACCGAAACCAGAGAGCCCGCCTACGCCTACGACTTCA | |
| | GAGGCAGATTCGCCTTCAGCCTGGAAACCAGCGCCAGCAC | |
| | CGCCTACCTGCAGATCAACAACCTGAAGTACGAGGACACC | |
| | GCCACCTACTTTTGCGCCCTGGACTACAGCTACGCCATGGA | |
| | CTATTGGGGCCAGGGCACCAGCGTGACCGTGTCCTCTTTCG | |
| | TGCCTGTGTTTCTGCCTGCCAAGCCCACCACAACCCCTGCC | |
| | CCTAGACCTCCTACACCCGCCCCTACAATCGCCAGCCAGCC | |
| | TCTGTCTCTGAGGCCCGAGGCTTGTAGACCTGCTGCTGGCG | |
| | GAGCCGTGCACACCAGAGGACTGGATTTCGCCTGCGACAT | |
| | CTACATCTGGGCCCCTCTGGCCGGCACATGTGGCGTGCTGC | |
| | TGCTGAGCCTCGTGATCACCCTGTACTGCAACCACCGGAAC | |
| | AAGCGGGGCAGAAAGAAGCTGCTGTACATCTTCAAGCAGC | |
| | CCTTCATGCGGCCCGTGCAGACCACCCAGGAAGAGGACGG | |
| | CTGCTCCTGCAGATTCCCCGAGGAAGAAGAAGGCGGCTGC | |
| | GAGCTGAGAGTGAAGTTCAGCAGAAGCGCCGACGCCCCTG | |
| | CCTATCAGCAGGGCCAGAACCAGCTGTACAACGAGCTGAA | |
| | CCTGGGCAGACGGGAAGAGTACGACGTGCTGGACAAGCGG | |
| | AGAGGCAGGGACCCTGAGATGGGCGGCAAGCCCAGAAGA | |
| | AAGAACCCCCAGGAAGGCCTGTATAACGAACTGCAGAAAG | |
| | ACAAGATGGCCGAGGCCTACAGCGAGATCGGAATGAAGG | |
| | GCGAGCGGAGAAGAGGCAAGGGCCACGATGGCCTGTACC | |
| | AGGGCCTGAGCACCGCCACCAAGGACACCTATGACGCCCT | |
| | GCACATGCAGGCCCTGCCCCCCAGATGA | |

BCMA CAR5

| | | |
|---|---|---|
| BCMA CAR5 | MALPVTALLLPLALLLHAARPEVQLLESGGGLVQPGGSLRLS | 15505 |
| Full CAR | CAASGFTFSSYAMSWVRQAPGKGLEWVSSISGSGDYIYYADS | |
| (amino acid) | VKGRFTISRDISKNTLYLQMNSLRAEDTAVYYCAKEGTGANS | |
| | SLADYRGQGTLVTVSSFVPVFLPAKPTTTPAPRPPTPAPTIASQ | |
| | PLSLRPEACRPAAGGAVHTRGLDFACDIYIWAPLAGTCGVLL | |
| | LSLVITLYCNHRNRSKRSRLLHSDYMNMTPRRPGPTRKHYQP | |
| | YAPPRDFAAYRSRVKFSRSADAPAYQQGQNQLYNELNLGRR | |
| | EEYDVLDKRRGRDPEMGGKPRRKNPQEGLYNELQKDKMAE | |
| | AYSEIGMKGERRRGKGHDGLYQGLSTATKDTYDALHMQALP | |
| | PR | |
| BCMA CAR5 | ATGGCCCTGCCTGTTACAGCTCTGCTGCTGCCTCTGGCTCT | 15506 |
| Full CAR | GCTTCTGCATGCCGCCAGACCTGAGGTGCAGCTGTTGGAGT | |
| (nucleic acid) | CTGGGGGAGGCTTGGTACAGCCTGGGGGGTCCCTGAGACT | |
| | CTCCTGTGCAGCCTCTGGATTCACCTTTAGCAGCTATGCCA | |
| | TGAGCTGGGTCCGCCAGGCTCCAGGGAAGGGGCTGGAGTG | |
| | GGTCTCATCTATTAGTGGTAGTGGTGATTACATATACTACG | |
| | CAGACTCCGTGAAGGGCCGGTTCACCATCTCCAGAGACAT | |
| | ATCCAAGAACACGCTGTATCTGCAAATGAACAGCCTGAGA | |
| | GCCGAGGACACGGCCGTATATTACTGTGCGAAAGAAGGTA | |
| | CGGGTGCCAACAGCAGCTTGGCAGACTACAGAGGCCAGGG | |
| | CACCCTGGTCACCGTCTCCTCATTCGTGCCCGTGTTCCTGCC | |
| | TGCCAAGCCTACAACAACCCCTGCTCCTAGACCTCCTACAC | |
| | CAGCTCCTACAATCGCCAGCCAGCCTCTGTCTCTGAGGCCT | |
| | GAAGCTTGTAGACCTGCTGCTGGCGGAGCCGTGCATACCA | |
| | GAGGACTGGATTTCGCCTGCGACATCTACATCTGGGCCCCT | |
| | CTGGCTGGAACATGTGGCGTTTTGCTGCTGAGCCTCGTGAT | |
| | CACCCTGTACTGCAACCACCGGAACAGAAGCAAGCGGAGC | |
| | CGGCTGCTGCACAGCGACTACATGAACATGACCCCCAGAC | |
| | GGCCTGGCCCCACCAGAAAGCACTACCAGCCTTACGCCCC | |
| | TCCCAGAGACTTCGCCGCCTACCGGTCCAGAGTGAAGTTCA | |
| | GCAGAAGCGCCGACGCCCCTGCCTATCAGCAGGGCCAGAA | |
| | CCAGCTGTACAACGAGCTGAACCTGGGCAGACGGGAAGAG | |
| | TACGATGTGCTGGACAAAAGACGTGGCCGGGACCCTGAGA | |
| | TGGGGGGAAAGCCGAGAAGGAAGAACCCTCAGGAAGGCC | |
| | TGTACAATGAACTGCAGAAAGATAAGATGGCGGAGGCCTA | |
| | CAGTGAGATTGGGATGAAAGGCGAGCGCCGGAGGGGCAA | |
| | GGGGCACGATGGCCTTTACCAGGGTCTCAGTACAGCCACC | |
| | AAGGACACCTACGACGCCCTTCACATGCAGGCCCTGCCCC | |
| | CTCGCTAA | |

BCMA CAR6

| | | |
|---|---|---|
| BCMA CAR6 | MALPVTALLLPLALLLHAARPEVQLLESGGGLVQPGGSLRLS | 15507 |
| Full CAR | CAASGFTFSSYAMSWVRQAPGKGLEWVSSISGSGDYIYYADS | |
| (amino acid) | VKGRFTISRDISKNTLYLQMNSLRAEDTAVYYCAKEGTGANS | |
| | SLADYRGQGTLVTVSSFVPVFLPAKPTTTPAPRPPTPAPTIASQ | |
| | PLSLRPEACRPAAGGAVHTRGLDFACDIYIWAPLAGTCGVLL | |
| | LSLVITLYCNHRNKRGRKKLLYIFKQPFMRPVQTTQEEDGCSC | |
| | RFPEEEEGGCELRVKFSRSADAPAYQQGQNQLYNELNLGRRE | |
| | EYDVLDKRRGRDPEMGGKPRRKNPQEGLYNELQKDKMAEA | |
| | YSEIGMKGERRRGKGHDGLYQGLSTATKDTYDALHMQALPP | |
| | R | |
| BCMA CAR6 | ATGGCCCTGCCTGTTACAGCTCTGCTGCTGCCTCTGGCTCT | 15508 |
| Full CAR | GCTTCTGCATGCCGCCAGACCTGAGGTGCAGCTGTTGGAGT | |
| (nucleic acid) | CTGGGGGAGGCTTGGTACAGCCTGGGGGGTCCCTGAGACT | |
| | CTCCTGTGCAGCCTCTGGATTCACCTTTAGCAGCTATGCCA | |
| | TGAGCTGGGTCCGCCAGGCTCCAGGGAAGGGGCTGGAGTG | |
| | GGTCTCATCTATTAGTGGTAGTGGTGATTACATATACTACG | |
| | CAGACTCCGTGAAGGGCCGGTTCACCATCTCCAGAGACAT | |
| | ATCCAAGAACACGCTGTATCTGCAAATGAACAGCCTGAGA | |
| | GCCGAGGACACGGCCGTATATTACTGTGCGAAAGAAGGTA | |
| | CGGGTGCCAACAGCAGCTTGGCAGACTACAGAGGCCAGGG | |
| | CACCCTGGTCACCGTCTCCTCATTCGTGCCCGTGTTCCTGCC | |
| | TGCCAAGCCTACAACAACCCCTGCTCCTAGACCTCCTACAC | |
| | CAGCTCCTACAATCGCCAGCCAGCCTCTGTCTCTGAGGCCT | |
| | GAAGCTTGTAGACCTGCTGCTGGCGGAGCCGTGCATACCA | |
| | GAGGACTGGATTTCGCCTGCGACATCTACATCTGGGCCCCT | |
| | CTGGCTGGAACATGTGGCGTTTTGCTGCTGAGCCTCGTGAT | |
| | CACCCTGTACTGCAACCACCGGAACAAGCGGGGCAGAAAG | |
| | AAGCTGCTGTACATCTTCAAGCAGCCCTTCATGCGGCCCGT | |
| | GCAGACCACCCAGGAAGAGGACGGCTGCTCCTGCAGATTC | |
| | CCCGAGGAAGAAGAAGGCGGCTGCGAGCTGAGAGTGAAG | |
| | TTCAGCAGAAGCGCCGACGCCCCTGCCTATCAGCAGGGCC | |
| | AGAACCAGCTGTACAACGAGCTGAACCTGGGCAGACGGGA | |
| | AGAGTACGACGTGCTGGACAAGCGGAGAGGCAGGGACCCT | |
| | GAGATGGGCGGCAAGCCCAGAAGAAAGAACCCCCAGGAA | |
| | GGCCTGTATAACGAACTGCAGAAAGACAAGATGGCCGAGG | |
| | CCTACAGCGAGATCGGAATGAAGGGCGAGCGGAGAAGAG | |
| | GCAAGGGCCACGATGGCCTGTACCAGGGCCTGAGCACCGC | |
| | CACCAAGGACACCTATGACGCCCTGCACATGCAGGCCCTG | |
| | CCCCCCAGATGA | |

BCMA CAR7

| | | |
|---|---|---|
| BCMA CAR7 | QVQLVQSGAEVKKPGASVKVSCKASGYSFPDYYINWVRQAP | 15509 |
| VH (amino | GQGLEWMGWIYFASGNSEYNQKFTGRVTMTRDTSSSTAYME | |
| acid) | LSSLRSEDTAVYFCASLYDYDWYFDVWGQGTMVTVSS | |
| BCMA CAR 7 | DIVMTQTPLSLSVTPGEPASISCKSSQSLVHSNGNTYLHWYLQ | 15510 |
| VL (amino | KPGQSPQLLIYKVSNRFSGVPDRFSGSGSGADFTLKISRVEAE | |
| acid) | DVGVYYCAETSHVPWTFGQGTKLEIK | |

BCMA CAR-8

| | | |
|---|---|---|
| BCMA CAR-8 | MALPVTALLLPLALLLHAARP | 15542 |
| CD8α signal | | |
| peptide (amino | | |
| acid) | | |
| BCMA CAR-8 | EVQLLESGGGLVQPGGSLRLSCAASGFTFSSYAMNWVRQAP | 15551 |
| VH (amino | GKGLEWVSAISDSGGSTYYADSVKGRFTISRDNSKNTLYLQ | |
| acid) | MNSLRAEDTAVYYCARYWPMDIWGQGTLVTVSS | |
| BCMA CAR-8 | GGGGSGGGGSGGGGS | 109 |
| GS linker | | |
| (amino acid) | | |
| BCMA CAR-8 | EIVLTQSPGTLSLSPGERATLSCRASQSVSSSYLAWYQQKPGQ | 15552 |
| VL (amino | APRLLMYDASIRATGIPDRFSGSGSGTDFTLTISRLEPEDFAVY | |
| acid) | YCQQYGSWPLTFGQGTKVEIK | |
| BCMA CAR-8 | GSGGGGSCPYSNPSLCSGGGGSCPYSNPSLCSGGGGS | 15553 |
| CD20 epitope | | |
| (amino acid) | | |
| BCMA CAR-8 | TTTPAPRPPTPAPTIASQPLSLRPEACRPAAGGAVHTRGLDFAC | 1101 |
| CD8α hinge | D | |
| (amino acid) | | |
| BCMA CAR-8 | IYIWAPLAGTCGVLLLSLVITYC | 15554 |
| CD8α | | |
| transmembrane | | |
| domain (amino | | |
| acid) | | |
| BCMA CAR-8 | KRGRKKLLYIFKQPFMRPVQTTQEEDGCCRFPEEEEGGCEL | 15480 |
| 4-1BB | | |
| intracellular | | |
| signaling | | |
| domain (amino | | |
| acid) | | |
| BCMA CAR-8 | RVKFSRSADAPAYQQGQNQLYNELNLGRREEYDVLDKRRGR | 1104 |
| CD3z | DPEMGGKPRRKNPQEGLYNELQKDKMAEAYSEIGMKGERRR | |
| instracellular | GKGHDGLYQGLSTATKDTYDALHMQALPPR | |
| signaling | | |
| domain (amino | | |
| acid) | | |
| BCMA CAR-8 | MALPVTALLLPLALLLHAARPEVQLLESGGGLVQPGGSLRLS | 15555 |
| Full CAR | CAASGFTFSSYAMNWVRQAPGKGLEWVSAISDSGGSTYYAD | |
| (amino acid) | SVKGRFTISRDNSKNTLYLQMNSLRAEDTAVYYCARYWPMD | |
| | IWGQGTLVTVSSGGGGSGGGGSGGGGSEIVLTQSPGTLSLSPG | |
| | ERATLSCRASQSVSSSYLAWYQQKPGQAPRLLMYDASIRATG | |
| | IPDRFSGSGSGTDFTLTISRLEPEDFAVYYCQQYGSWPLTFGQ | |
| | GTKVEIKTTTPAPRPPTPAPTIASQPLSLRPEACRPAAGGAVHT | |
| | RGLDFACDIYIWAPLAGTCGVLLLSLVITLYCKRGRKKLLYIF | |
| | KQPFMRPVQTTQEEDGCSCRFPEEEEGGCELRVKFSRSADAP | |
| | AYQQGQNQLYNELNLGRREEYDVLDKRRGRDPEMGGKPRR | |
| | KNPQEGLYNELQKDKMAEAYSEIGMKGERRRGKGHDGLYQ | |
| | GLSTATKDTYDALHMQALPPR | |
| BCMA CAR-8 | atggcactgcctgtgaccgccctgctgctgccactggccctgctgctgcacgccgcccggccag | 15556 |
| Full CAR | aggtgcagctgctggagagcggaggaggactggtgcagccaggaggaagcctgagactgtcc | |
| (nucleic acid) | tgcgccgcctctggcttcaccttcagctcctacgccatgaactgggtgaggcaggcaccaggcaa | |
| | gggactggagtgggtgtctgccatcctgtctagcggcggcagcacctactatgccgattccgtga | |
| | agggccgcttcacaatcagccgggacaactccaagaataccctgtacctgcagatgaacagcct | |
| | gagagccgaggatacagccgtgtactattgcgccaggtattggcccatggacatctggggccag | |
| | ggcacactggtgaccgtgtcctctggaggaggaggatccggcggaggaggctctggcggcgg | |
| | cggcagcgagatcgtgctgacacagagcccaggcaccctgagcctgtcccctggagagagag | |
| | ccaccctgtcttgtaggggcggccagagcgtgagctcctcttacctggcctggtatcagcagaag | |
| | ccaggccaggcccccagactgctgatgtacgacgcctccatcagggcaacaggcatccccgat | |
| | cggttctctggaagcggatccggaaccgactttacactgaccatctccaggctggagcctgagga | |
| | tttcgccgtgtactattgccagcagtaccagtcttggccactgacatttggccagggcaccaaggt | |
| | ggagatcaagggatccggaggaggaggatcttgcccttattccaacccatctctgtgcaccacaac | |
| | ccctgcaccaaggccacctacaccagcacctaccatcgcctctcagccactgagcctgagaccc | |
| | gaggcctgtaggcctgcagcaggaggagcagtgcacacacggggactggactttgcctgcgat | |
| | atctacatctgggcacctctggcaggaacatgtggcgtgctgctgctgagcctggtcatcaccctg | |
| | tactgcaagagaggcaggaagaagctgctgtatatcttcaagcagccctttatgcgccctgtgcag | |
| | acaacccaggaggaggatggctgctcctgtaggttcccagaagaggaggagggaggatgtgag | |
| | ctgcgcgtgaagttttctcggagcgccgacgcacctgcataccagcagggacagaatcagctgta | |
| | taacgagctgaatctgggccggagagaggagtatgacgtgctggataagaggaggggaaggg | |
| | acccagagatgggaggcaagccacggagaaagaacccccaggagggcctgtacaatgagctg | |
| | cagaaggataagatggccgaggcctatagcgagatcggcatgaagggagagaggcgccggg | |
| | gcaagggacacgacggactgtaccagggactgtccacagccaccaaggacacctatgatgccc | |
| | tgcacatgcaggccctgccaccaaggtga | |

BCMA CAR-9

| | | |
|---|---|---|
| BCMA CAR-9 | EVQLLESGGGLVQPGGSLRLSCAASGFTFSSYPMSWVRQAPG | 15557 |
| VH (amino | KGLEWVSAIGGSGGSLPYADSVKGRFTISRDNSKNTLYLQM | |
| acid) | NSLRAEDTAVYYCARYWPMDIWGQGTLVTVSS | |
| BCMA CAR-9 | EIVLTQSPGTLSLSPGERATLSCRASQSVSSSYLAWYQQKPGQ | 15558 |
| VL (amino | APRLLMYDASIRATGIPDRFSGSGSGTDFTLTISRLEPEDFAVY | |
| acid) | YCQQYQSWPLTFGQGTKVEIK | |
| BCMA CAR-10 | | |
| BCMA CAR- | MGSWVEFWDRLGAIRERLEALGGSEAELAAFEKEIAAFESEL | 15559 |
| 10D domain | QAYKGKGNPEVEKLRYVAAVIRHRLQAYRHN | |
| (amino acid) | | |
| BCMA CAR-11 | | |
| BCMA CAR- | MGSWSEFWVRLGAIRERLDALGGSEAELAAFEKEIAAFESEL | 15560 |
| 11D domain | QAYKGKGNPEVEKLRYTAATIRRFLQAYRHN | |
| (amino acid) | | |
| BCMA CAR-12 | | |
| BCMA CAR- | MGSWSEFWARLGAIRERLDALGGSEABLAAFEKEIAAFESEL | 15561 |
| 12D domain | QAYKGKGNPEVEKLRYTAGTIKRFLQAYRHN | |
| (amino acid) | | |
| CD19 CAR1 | | |
| CD19 CAR1 | DIQMTQTTSSLSASLGDRVTISCRASQDISKYLNWYQQKPDGT | 15511 |
| VL (amino | VKLLIYHTSRLHSGVPSRFSGSGSGTDYSLTISNLEQEDIATYF | |
| acid) | CQQGNTLPYTFGGGTKLEIT | |
| CD19 CAR1 | GACATCCAGATGACACAGACTACATCCTCCCTGTCTGCCTC | 15512 |
| VL (nucleic | TCTGGGAGACAGAGTCACCATCAGTTGCAGGGCAAGTCAG | |
| acid) | GACATTAGTAAATATTTAAATTGGTATCAGCAGAAACCAG | |
| | ATGGAACTGTTAAACTCCTGATCTACCATACATCAAGATTA | |
| | CACTCAGGAGTCCCATCAAGGTTCAGTGGCAGTGGGTCTG | |
| | GAACAGATTATTCTCTCACCATTAGCAACCTGGAGCAAGA | |
| | AGATATTGCCACTTACTTTTGCCAACAGGGTAATACGCTTC | |
| | CGTACACGTTCGGAGGGGGGACTAAGTTGGAAATAACA | |
| CD19 CAR1 | EVKLQESGPGLVAPSQSLSVTCTVSGVSLPDYGVSWIRQPPRK | 15513 |
| VH (amino | GLEWLGVIWGSETTYYNSALKSRLTIIKDNSKSQVFLKMNSL | |
| acid) | QTDDTAIYYCAKHYYYGGSYAMDYWGQGTSVTVSS | |
| CD19 CAR1 | GAGGTGAAACTGCAGGAGTCAGGACCTGGCCTGGTGGCGC | 15514 |
| VH (nucleic | CCTCACAGAGCCTGTCCGTCACATGCACTGTCTCAGGGGTC | |
| acid) | TCATTACCCGACTATGGTGTAAGCTGGATTCGCCAGCCTCC | |
| | ACGAAAGGGTCTGGAGTGGCTGGGAGTAATATGGGGTAGT | |
| | GAAACCACATACTATAATTCAGCTCTCAAATCCAGACTGAC | |
| | CATCATCAAGGACAACTCCAAGAGCCAAGTTTTCTTAAAA | |
| | ATGAACAGTCTGCAAACTGATGACACAGCCATTTACTACTG | |
| | TGCCAAACATTATTACTACGGTGGTAGCTATGCTATGGACT | |
| | ACTGGGGTCAAGGAACCTCAGTCACCGTCTCCTCA | |
| CD19 CAR1 | DIQMTQTTSSLSASLGDRVTISCRASQDISKYLNWYQQKPDGT | 15521 |
| scFv (amino | VKLLIYHTSRLHSGVPSRFSGSGSGTDYSLTISNLEQEDIATYF | |
| acid) | CQQGNTLPYTFGGGTKLEITGSTSGSGKPGSGEGSTKGEVKLQ | |
| | ESGPGLVAPSQSLSVTCTVSGVSLPDYGVSWIRQPPRKGLEWL | |
| | GVIWGSETTYYNSALKSRLTIIKDNSKSQVFLKMNSLQTDDTA | |
| | IYYCAKHYYYGGSYAMDYWGQGTSVTVSS | |
| CD19 CAR1 | DIQMTQTTSSLSASLGDRVTISCRASQDISKYLNWYQQKPDGT | 15515 |
| Full CAR | VKLLIYHTSRLHSGVPSRFSGSGSGTDYSLTISNLEQEDIATYF | |
| (amino acid) | CQQGNTLPYTFGGGTKLEITGSTSGSGKPGSGEGSTKGEVKLQ | |
| | ESGPGLVAPSQSLSVTCTVSGVSLPDYGVSWIRQPPRKGLEWL | |
| | GVIWGSETTYYNSALKSRLTIIKDNSKSQVFLKMNSLQTDDTA | |
| | IYYCAKHYYYGGSYAMDYWGQGTSVTVSSTTTPAPRPPTPAP | |
| | TIASQPLSLRPEACRPAAGGAVHTRGLDFACDIYIWAPLAGTC | |
| | GVLLLSLVITLYCRSKRSRLLHSDYMNMTPRRPGPTRKHYQP | |
| | YAPPRDFAAYRSRVKFSRSADAPAYQQGQNQLYNELNLGRR | |
| | EEYDVLDKRRGRDPEMGGKPRRKNPQEGLYNELQKDKMAE | |
| | AYSEIGMKGERRRGKGHDGLYQGLSTATKDTYDALHMQALP | |
| | PRKRGRKKLLYIFKQPFMRPVQTTQEEDGCSCRFPEEEEGGCE | |
| | L | |
| CD19 CAR1 | GACATCCAGATGACACAGACTACATCCTCCCTGTCTGCCTC | 15516 |
| Full CAR | TCTGGGAGACAGAGTCACCATCAGTTGCAGGGCAAGTCAG | |
| (nucleic acid) | GACATTAGTAAATATTTAAATTGGTATCAGCAGAAACCAG | |
| | ATGGAACTGTTAAACTCCTGATCTACCATACATCAAGATTA | |
| | CACTCAGGAGTCCCATCAAGGTTCAGTGGCAGTGGGTCTG | |
| | GAACAGATTATTCTCTCACCATTAGCAACCTGGAGCAAGA | |
| | AGATATTGCCACTTACTTTTGCCAACAGGGTAATACGCTTC | |
| | CGTACACGTTCGGAGGGGGGACTAAGTTGGAAATAACAGG | |
| | CTCCACCTCTGGATCCGGCAAGCCCGGATCTGGCGAGGGA | |
| | TCCACCAAGGGCGAGGTGAAACTGCAGGAGTCAGGACCTG | |
| | GCCTGGTGGCGCCCTCACAGAGCCTGTCCGTCACATGCACT | |
| | GTCTCAGGGGTCTCATTACCCGACTATGGTGTAAGCTGGAT | |
| | TCGCCAGCCTCCACGAAAGGGTCTGGAGTGGCTGGGAGTA | |
| | ATATGGGGTAGTGAAACCACATACTATAATTCAGCTCTCAA | |
| | ATCCAGACTGACCATCATCAAGGACAACTCCAAGAGCCAA | |
| | GTTTTCTTAAAAATGAACAGTCTGCAAACTGATGACACAGC | |
| | CATTTACTACTGTGCCAAACATTATTACTACGGTGGTAGCT | |
| | ATGCTATGGACTACTGGGGTCAAGGAACCTCAGTCACCGT | |
| | CTCCTCAACCACTACCCCAGCACCGAGGCCACCCACCCCG | |
| | GCTCCTACCATCGCCTCCCAGCCTCTGTCCCTGCGTCCGGA | |
| | GGCATGTAGACCCGCAGCTGGTGGGGCCGTGCATACCCGG | |
| | GGTCTTGACTTCGCCTGCGATATCTACATTTGGGCCCCTCT | |
| | GGCTGGTACTTGCGGGGTCCTGCTGCTTTCACTCGTGATCA | |
| | CTCTTTACTGTAGGAGTAAGAGGAGCAGGCTCCTGCACAG | |
| | TGACTACATGAACATGACTCCCCGCCGCCCCGGGCCCACCC | |
| | GCAAGCATTACCAGCCCTATGCCCCACCACGCGACTTCGCA | |
| | GCCTATCGCTCCAGAGTGAAGTTCAGCAGGAGCGCAGACG | |
| | CCCCCGCGTACCAGCAGGGCCAGAACCAGCTCTATAACGA | |
| | GCTCAATCTAGGACGAAGAGAGGAGTACGATGTTTTGGAC | |
| | AAGAGACGTGGCCGGGACCCTGAGATGGGGGGAAAGCCG | |
| | AGAAGGAAGAACCCTCAGGAAGGCCTGTACAATGAACTGC | |
| | AGAAAGATAAGATGGCGGAGGCCTACAGTGAGATTGGGAT | |
| | GAAAGGCGAGCGCCGGAGGGGCAAGGGGCACGATGGCCT | |
| | TTACCAGGGTCTCAGTACAGCCACCAAGGACACCTACGAC | |
| | GCCCTTCACATGCAGGCCCTGCCCCCTCGCAAACGGGGCA | |
| | GAAAGAAACTCCTGTATATATTCAAACAACCATTTATGAG | |
| | ACCAGTACAAACTACTCAAGAGGAAGATGGCTGTAGCTGC | |
| | CGATTTCCAGAAGAAGAAGAAGGAGGATGTGAACTG | |

GPRC5D CAR1

| | | |
|---|---|---|
| GPRC5D | QMQLVQSGAEVKKPGASVKVSCKASGYTFNRYAITWVRQAP | 15522 |
| CAR1 VH | GQGLEWMGWISAYNGNSHYAQKLQGRVTMTTDTSTGTAYM | |
| (amino acid) | ELRRLRSDDTAVYYCARMAYDSWGQGTLVTVSS | |
| GPRC5D | cagatgcagctggtgcagtctggagctgaggtgaagaagcctggggcctcagtga | 15523 |
| CAR1 VH | aggtctcctgcaaggcttctggttacacctttaacagatatgctatcacctgggt | |
| (nucleic acid) | gcgacaggcccctggacaaggccttgagtggatgggatggatcagcgcttacaat | |
| | ggtaattcacactatgcacagaagctccagggcagagtcaccatgaccacagaca | |
| | catccacgggcacagcctatatggagctgaggaggctgagatctgacgacacggc | |
| | cgtgtattactgtgcgcgcatggcttacgattcttggggtcaaggtactctggtg | |
| | accgtctcctca | |
| GPRC5D | QSVLTQPASVSGSPGQSLTISCTGTSNDVGAYKYVSWYQQYP | 15524 |
| CAR1 VL | GKAPKLILYDVFKRPSGVSNRFSGSKSDNTASLTISGLQAEDE | |
| (amino acid) | ADYYCFSLTSSNTYVFGTGTKVTVLG | |
| GPRC5D | cagtctgtgttgacgcagcctgcctccgtgtctgggtctcctggacagtcgctcaccatctcctg | 15525 |
| CAR1 VL | cactggaaccagcaatgacgttggtgcttataagtatgtctcctggtatcaacagtacccaggca | |
| (nucleic acid) | aagcccccaaactcatactttatgatgtctttaagcggccctcaggggtctctaatcgcttctct | |
| | ggctccaagtctgacaacacggcctccctgaccatctctgggctccaggctgaggacgaggctga | |
| | ttattactgcttctcacttacaagcagtaacacttatgtcttcggaactgggaccaaggtcaccg | |
| | tcctaggt | |
| GPRC5D | QSVLTQPASVSGSPGQSLTISCTGTSNDVGAYKYVSWYQQYP | 15526 |
| CAR1 scFv | GKAPKLILYDVFKRPSGVSNRFSGSKSDNTASLTISGLQAEDE | |
| (amino acid) | ADYYCFSLTSSNTYVFGTGTKVTVLGSRGGGGSGGGGSGGG | |
| | GSLEMAQMQLVQSGAEVKKPGASVKVSCKASGYTFNRYAIT | |
| | WVRQAPGQGLEWMGWISAYNGNSHYAQKLQGRVTMTTDTS | |
| | TGTAYMELRRLRSDDTAVYYCARMAYDSWGQGTLVTVSS | |

GPRC5D CAR2

| | | |
|---|---|---|
| GPRC5D | EVQLVESGGGLVKPGGSLRLSCAASGFTFSDYYMSWIRQAPG | 15527 |
| CAR2 VH | KGLEWVSYISSSGSTIYYADSVKGRFTISRDNAKNSLYLQMNS | |
| (amino acid) | LRAEDTAVYYCARGYGKAYDQWGQGTLVTVSS | |
| GPRC5D | Gaggtgcagctggtggagtctgggggaggcttggtcaagcctggagggtccctgagactctcct | 15528 |
| CAR2 VH | gtgcagcctctggattcaccttcagtgactactacatgagctggatccgccaggctccagggaag | |
| (nucleic acid) | gggctggagtgggtttcatacattagtagtagtggtagtaccatatactacgcagactctgtgaa | |
| | gggccgattcaccatctccagggacaacgccaagaactcactgtatctgcaaatgaacagcctga | |
| | gagccgaggacacggccgtatattactgtgcgcgcggttacggtaaagcttacgatcagtggggt | |
| | caaggtactctggtgaccgtctcctca | |
| GPRC5D | QSVLTQPPSASGTPGQRVTISCSGSRSNVGGNYVFWYQQVPG | 15529 |
| CAR2 VL | ATPKLLIYRSNQRPSGVPDRFAGSKSGSSASLAISGLRSEDEAD | |
| (amino acid) | YYCATWDDSLSGFVFGTGTKVTVLG | |
| GPRC5D | cagtctgtgttgactcagccaccctcagcgtctgggacccccggacagagggtcaccatctcttg | 15530 |
| CAR2 VL | ttctggaagcaggtccaacgtaggaggtaattatgtattttggtaccagcaagtccccggagcga | |
| (nucleic acid) | cccccaaactcctcatctataggagtaatcagcggccctcgggggtccctgaccgattcgctggc | |
| | tccaagtctggctcctcagcctccctggccatcagtggactccggtccgaggatgaggctgatta | |
| | ttactgtgcaacatgggatgacagcctgagtggttttgtcttcggaactgggaccaaggtcaccg | |
| | tcctaggt | |
| GPRC5D | QSVLTQPPSASGTPGQRVTISCSGSRSNVGGNYVFWYQQVPG | 15531 |
| CAR2 scFv | ATPKLLIYRSNQRPSGVPDRFAGSKSGSSASLAISGLRSEDEAD | |
| (amino acid) | YYCATWDDSLSGFVFGTGTKVTVLGSRGGGGSGGGGSGGGG | |
| | SLEMAEVQLVESGGGLVKPGGSLRLSCAASGFTFSDYYMSWI | |
| | RQAPGKGLEWVSYISSSGSTIYYADSVKGRFTISRDNAKNSLY | |
| | LQMNSLRAEDTAVYYCARGYGKAYDQWGQGTLVTVSS | |

GPRC5D CAR3

| | | |
|---|---|---|
| GPRC5D | QVQLVESGGGLVHPGGSLRLSCAASGFTFRSHSMNWVRQAP | 15532 |
| CAR3 VH | GKGLEWVSSISSDSTYTYYADSVKGRFTISRDNAKNSLYLQM | |
| (amino acid) | NSLRAEDTAVYYCARSGGQWKYYDYWGQGTLVTVSS | |
| GPRC5D | Caggtgcagctggtggagtctgggggaggcctggtccaccctggggggtccctgagactctcct | 15533 |
| CAR3 VH | gtgcagcctctggattcaccttcagaagccatagcatgaactgggtccgccaggctccagggaag | |
| (nucleic acid) | gggctggagtgggtctcatccattagtagtgatagtacttacacatactacgcagactcagtgaa | |
| | gggccgattcaccatctccagagacaacgccaagaactcactgtatctgcaaatgaacagcctga | |
| | gagccgaggacacggccgtatattactgtgcgcgctctggtggtcagtggaaatactacgattac | |
| | tggggtcaaggtactctggtgaccgtctcctca | |
| GPRC5D | SSELTQDPAVSVALGQTVRITCQGDSLRSYYASWYQQKPGQA | 15534 |
| CAR3 VL | PVLVIYGKNNRPSGIPDRFSGSSSGNTASLTITGAQAEDEADY | |
| (amino acid) | YCNSRDSSGNPPVVFGGGTKLTVLG | |
| GPRC5D | Tcttctgagctgactcaggaccctgctgtgtctgtggccttgggacagacagtcaggatcacatg | 15535 |
| CAR3 VL | ccaaggagacagcctcagaagctattatgcaagctggtaccagcagaagccaggacaggcccct | |
| (nucleic acid) | gtacttgtcatctatggtaaaaacaaccggccctcagggatcccagaccgattctctggctccag | |
| | ctcaggaaacacagcttccttgaccatcactggggctcaggcggaagatgaggctgactattact | |
| | gtaactcccgggacagcagtggtaacccccctgtggtattcggcggagggaccaagctgaccgtc | |
| | ctaggt | |
| GPRC5D | SSELTQDPAVSVALGQTVRITCQGDSLRSYYASWYQQKPGQA | 15536 |
| CAR3 scFv | PVLVIYGKNNRPSGIPDRFSGSSSGNTASLTITGAQAEDEADY | |
| (amino acid) | YCNSRDSSGNPPVVFGGGTKLTVLGSRGGGGSGGGGSGGGG | |
| | SLEMAQVQLVESGGGLVHPGGSLRLSCAASGFTFRSHSMNW | |
| | VRQAPGKGLEWVSSISSDSTYTYYADSVKGRFTISRDNAKNS | |
| | LYLQMNSLRAEDTAVYYCARSGGQWKYYDYWGQGTLVTVS | |
| | S | |

GPRC5D CAR4

| | | |
|---|---|---|
| GPRC5D | EVQLVESGGGLIQPGGSLRLSCAASGFTFSNYAMNWVRQAPG | 15537 |
| CAR4 VH | KGLEWVSTINGRGSSTIYADSVKGRFTISRDNSKNTLYLQMNS | |
| (amino acid) | LRAEDTATYYCARYISRGLGDSWGQGTLVTV | |
| GPRC5D | Gaggtgcagctggtggagtccgggggaggcttgatacagcctggggggtccctgagactctcc | 15538 |
| CAR4 VH | tgtgcagcctctggattcacctttagcaactatgccatgaactgggtccgccaggctccagggaa | |
| (nucleic acid) | ggggctggagtgggtctcaactattaatggtcgtggtagtagtacaatctacgcagactccgtga | |
| | agggccggttcaccatctccagagacaattccaagaacacgctgtatctgcaaatgaacagcctg | |
| | agagccgaggacacagccacgtattactgtgcgcgctacatctctcgtggtctgggtgattcttg | |
| | gggtcaaggtactctcgtgaccgtctcctca | |
| GPRC5D | QSVVTQPPSMSAAPGQQVTISCSGGNSNIERNYVSWYLQLPG | 15539 |
| CAR4 VL | TAPKLVIFDNDRRPSGIPDRFSGSKSGTSATLGITGLQTGDEAD | |
| (amino acid) | YYCGTWDSSLRGWVFGGGTKLTVLG | |
| GPRC5D | Cagtctgtogtgacgcagccgccctcaatgtctgcggccccaggacagcaagtcaccatctcct | 15540 |
| CAR4 VL | gctctggaggcaactccaacattgagagaaattatgtatcctggtacctccagctccctggaaca | |
| (nucleic acid) | gcccccaaactcgtcatttttgacaatgataggcgaccctcagggattcctgaccgattctctgg | |
| | ctccaagtctggcacgtcagccaccctgggcatcaccggactccagactggggacgaggccgatt | |
| | attactgcggaacatgggatagcagcctgagaggttgggtgttcggcggagggaccaagctgacc | |
| | gtcctaggt | |
| GPRC5D | QSVVTQPPSMSAAPGQQVTISCSGGNSNIERNYVSWYLQLPG | 15541 |
| CAR4 scFv | TAPKLVIFDNDRRPSGIPDRFSGSKSGTSATLGITGLQTGDEAD | |
| (amino acid) | YYCGTWDSSLRGWVFGGGTKLTVLGSRGGGGSGGGGSGGG | |
| | GSLEMAEVQLVESGGGLIQPGGSLRLSCAASGFTFSNYAMNW | |
| | VRQAPGKGLEWVSTINGRGSSTIYADSVKGRFTISRDNSKNTL | |
| | YLQMNSLRAEDTATYYCARYISRGLGDSWGQGTLVTV | |
| CD20 CAR 1 | IVLTQSPAILSASPGEKVTMTCRASSSVNYMDWYQKKPGSSP | 15546 |
| scFv (amino | KPWIYATSNLASGVPARFSGSGSGTSYSLTISRVEAEDAATYY | |
| acid) | CQQWSFNPPTFGGGTKLEIKGSTSGGGSGGGSGGGGSSEVQL | |
| | QQSGAELVKPGASVKMSCKASGYTFTSYNMHWVKQTPGQG | |
| | LEWIGAIYPGNGDTSYNQKFKGKATLTADKSSSTAYMQLSSL | |
| | TSEDSADYYCARSNYYGSSYWFFDVWGAGTTVTVSS | |
| CD20 CAR 1 | ATTGTGCTGACCCAATCTCCAGCTATCCTGTCTGCATCTCC | 15547 |
| scFv (nucleic | AGGGGAGAAGGTCACAATGACTTGCAGGGCCAGCTCAAGT | |
| acid) | GTAAATTACATGGACTGGTACCAGAAGAAGCCAGGATCCT | |
| | CCCCCAAACCCTGGATTTATGCCACATCCAACCTGGCTTCT | |
| | GGAGTCCCTGCTCGCTTCAGTGGCAGTGGGTCTGGGACCTC | |
| | TTACTCTCTCACAATCAGCAGAGTGGAGGCTGAAGATGCT | |
| | GCCACTTATTACTGCCAGCAGTGGAGTTTTAATCCACCCAC | |
| | GTTCGGAGGGGGGACCAAGCTGGAAATAAAAGGCAGTACT | |
| | AGCGGTGGTGGCTCCGGGGGCGGTTCCGGTGGGGGCGGCA | |
| | GCAGCGAGGTGCAGCTGCAGCAGTCTGGGGCTGAGCTGGT | |
| | GAAGCCTGGGGCCTCAGTGAAGATGTCCTGCAAGGCTTCT | |
| | GGCTACACATTTACCAGTTACAATATGCACTGGGTAAAGC | |
| | AGACACCTGGACAGGGCCTGGAATGGATTGGAGCTATTTA | |
| | TCCAGGAAATGGTGATACTTCCTACAATCAGAAGTTCAAA | |
| | GGCAAGGCCACATTGACTGCAGACAAATCCTCCAGCACAG | |
| | CCTACATGCAGCTCAGCAGCCTGACATCTGAGGACTCTGCG | |
| | GACTATTACTGTGCAAGATCTAATTATTACGGTAGTAGCTA | |
| | CTGGTTCTTCGATGTCTGGGGCGCAGGGACCACGGTCACCG | |
| | TCTCCTCA | |
| CD20 CAR 1 | METDTLLLWVLLLWVPGSTGDIVLTQSPAILSASPGEKVTMT | 15548 |
| Full CAR | CRASSSVNYMDWYQKKPGSSPKPWIYATSNLASGVPARFSGS | |
| (amino acid) | GSGTSYSLTISRVEAEDAATYYCQQWSFNPPTFGGGTKLEIKG | |
| | STSGGGSGGGSGGGGSSEVQLQQSGAELVKPGASVKMSCKA | |
| | SGYTFTSYNMHWVKQTPGQGLEWIGAIYPGNGDTSYNQKFK | |
| | GKATLTADKSSSTAYMQLSSLTSEDSADYYCARSNYYGSSY | |
| | WFFDVWGAGTTVTVSSESKYGPPCPPCPMFWVLVVVGGVLA | |
| | CYSLLVTVAFIIFWVRSKRSRLLHSDYMNMTPRRPGPTRKHY | |
| | QPYAPPRDFAAYRSFSRSADAPAYQQGQNQLYNELNLGRREE | |
| | YDVLDKRRGRDPEMGGKPRRKNPQEGLYNELQKDKMAEAY | |
| | SEIGMKGERRRGKGHDGLYQGLSTATKDTYDALHMQALPPR | |
| CD20 CAR 1 | ATGGAGACAGACACACTCCTGCTATGGGTGCTGCTGCTCTG | 15549 |
| Full CAR | GGTTCCAGGTTCCACAGGTGACATTGTGCTGACCCAATCTC | |
| (nucleic acid) | CAGCTATCCTGTCTGCATCTCCAGGGGAGAAGGTCACAAT | |
| | GACTTGCAGGGCCAGCTCAAGTGTAAATTACATGGACTGG | |
| | TACCAGAAGAAGCCAGGATCCTCCCCCAAACCCTGGATTT | |
| | ATGCCACATCCAACCTGGCTTCTGGAGTCCCTGCTCGCTTC | |
| | AGTGGCAGTGGGTCTGGGACCTCTTACTCTCTCACAATCAG | |
| | CAGAGTGGAGGCTGAAGATGCTGCCACTTATTACTGCCAG | |
| | CAGTGGAGTTTTAATCCACCCACGTTCGGAGGGGGGACCA | |
| | AGCTGGAAATAAAAGGCAGTACTAGCGGTGGTGGCTCCGG | |
| | GGGCGGTTCCGGTGGGGGCGGCAGCAGCGAGGTGCAGCTG | |
| | CAGCAGTCTGGGGCTGAGCTGGTGAAGCCTGGGGCCTCAG | |
| | TGAAGATGTCCTGCAAGGCTTCTGGCTACACATTTACCAGT | |
| | TACAATATGCACTGGGTAAAGCAGACACCTGGACAGGGCC | |
| | TGGAATGGATTGGAGCTATTTATCCAGGAAATGGTGATACT | |
| | TCCTACAATCAGAAGTTCAAAGGCAAGGCCACATTGACTG | |
| | CAGACAAATCCTCCAGCACAGCCTACATGCAGCTCAGCAG | |
| | CCTGACATCTGAGGACTCTGCGGACTATTACTGTGCAAGAT | |
| | CTAATTATTACGGTAGTAGCTACTGGTTCTTCGATGTCTGG | |
| | GGCGCAGGGACCACGGTCACCGTCTCCTCAGAGAGCAAGT | |
| | ACGGACCGCCCTGCCCCCCTTGCCCTATGTTCTGGGTGCTG | |
| | GTGGTGGTCGGAGGCGTGCTGGCCTGCTACAGCCTGCTGGT | |
| | CACCGTGGCCTTCATCATCTTTTGGGTGaggagtaagaggagcaggct | |
| | cctgcacagtgactacatgaacatgactccccgccgccccgggcccacccgcaagcattaccag | |
| | ccctatgccccaccacgcgacttcgcagcctatcgctccTTCAGCAGAAGCGCCG | |
| | ACGCCCCTGCCTACCAGCAGGGCCAGAATCAGCTGTACAA | |
| | CGAGCTGAACCTGGGCAGAAGGGAAGAGTACGACGTCCTG | |
| | GATAAGCGGAGAGGCCGGGACCCTGAGATGGGCGGCAAG | |
| | CCTCGGCGGAAGAACCCCCAGGAAGGCCTGTATAACGAAC | |
| | TGCAGAAAGACAAGATGGCCGAGGCCTACAGCGAGATCGG | |
| | CATGAAGGGCGAGCGGAGGCGGGGCAAGGGCCACGACGG | |
| | CCTGTATCAGGGCCTGTCCACCGCCACCAAGGATACCTACG | |
| | ACGCCCTGCACATGCAGGCCCTGCCCCCAAGG | |

[0790] In some embodiments, the anti-BCMA CAR comprises a BCMA binding domain (e.g., from Table C9), a CD8 hinge domain (e.g., from Table C8), a CD8 transmembrane domain (e.g., from Table C6A), and a 4-1BB costimulatory domain (e.g., from Table C7A). In some embodiments, the anti-BCMA CAR additionally comprises a CD3z signaling domain (e.g., from Table C7A). In some embodiments, the anti-BCMA CAR comprises a BCMA binding domain (e.g., from Table C9), a CD8 hinge domain (e.g., from Table C8), a CD8 transmembrane domain (e.g., from Table C6A), a 4-1BB costimulatory domain (e.g., from Table C7A), and a CD3z signaling domain (e.g., from Table C7A). In some embodiments, the anti-BCMA CAR comprises a BCMA binding domain (e.g., from Table C9), a CD20 epitope, a CD8 hinge domain (e.g., from Table C8), a CD8 transmembrane domain (e.g., from Table C6A), a 4-1BB costimulatory domain (e.g., from Table C7A), and a CD3z signaling domain (e.g., from Table C7A). In some embodiments, the BCMA binding domain is murine. In some embodiments, the BCMA binding domain is humanized. In some embodiments, the BCMA binding domain is human. In some embodiments, the anti-BCMA CAR comprises a BCMA binding domain that comprises an scFv. In some embodiments, the anti-BCMA CAR comprises a BCMA binding domain that comprises two VHH domains (e.g., two linked camelid VHH antigen binding domains, e.g., VHH1 and VHH2 from Table C9). In some embodiments, the anti-BCMA CAR comprises a BCMA binding domain that comprises a D domain.

[0791] In some embodiments, the anti-BCMA CAR comprises a BCMA binding domain of Ciltacabtagene autoleucel (Carvykti), CT103A, CART-ddBCMA, NXC-201, idecabtagene vicleucel, ALLO-715, MCARH171, MCM998, P-BCMA-101, CTX120, or PBCAR269A. In some embodiments, the anti-BCMA CAR comprises Ciltacabtagene autoleucel (Carvykti), CT103A, CART-ddBCMA, NXC-201, idecabtagene vicleucel, ALLO-715, MCARH171, MCM998, P-BCMA-101, CTX120, or PBCAR269A.

[0792] In some embodiments, the anti-GPRC5D CAR comprises a VL and a VH domain from Table C9. In some embodiments, the anti-GPRC5D CAR comprises a VL domain, a VH domain, or an scFv of GPRC5D CARL, GPRC5D CAR2, GPRC5D CAR3, or GPRC5D CAR4 in Table C9. In some embodiments, the anti-GPRC5D CAR comprises a VL domain, a VH domain, or an scFv of GPRC5D CAR1, GPRC5D CAR2, GPRC5D CAR3, or GPRC5D CAR4 in Table C9, a CD28 transmembrane domain (e.g., from Table C6A), and a 4-1BB costimulatory domain (e.g., from Table C7A). In some embodiments, the anti-GPRC5D CAR additionally comprises a CD3z signaling domain (e.g., from Table C7A). In some embodiments, the GPRC5D binding domain is murine. In some embodiments, the GPRC5D binding domain is humanized. In some embodiments, the GPRC5D binding domain is human. In some embodiments, the anti-GPRC5D CAR comprises a GPRC5D binding domain that comprises an scFv. In some embodiments, the anti-GPRC5D CAR comprises a BCMA binding domain that comprises two VHH domains (e.g., two linked camelid VHH antigen binding domains, e.g., VHH1 and VHH2 from Table C9). In some embodiments, the anti-GPRC5D CAR comprises a GPRC5D binding domain that comprises a D domain.

[0793] In some embodiments, the anti-GPRC5D CAR comprises a GPRC5D binding domain of MCARH109, BMS-986393, or RD138. In some embodiments, the anti-GPRCSD CAR comprises MCARH109, BMS-986393, or RD138.

[0794] In some embodiments, the anti-CD19 CAR comprises a CD19 binding domain of FMC63. In some embodiments, the anti-CD19 CAR comprises a VL domain and a VH domain from Table C9. In some embodiments, the anti-CD19 CAR comprises a CD19 binding domain of FMC63, a CD28 hinge domain, a CD28 transmembrance domain, a CD28 costimlatory domain, and a CD3z signaling domain. In some embodiments, the anti-CD19 CAR comprises a CD19 binding domain of FMC63, a CD8a hinge domain, a CD8a transmembrance domain, a 4-1BB costimlatory domain, and a CD3z signaling domain. In some embodiments, the anti-CD19 CAR comprises a CD19 binding domain of FMC63, an IgG4 hinge domain, a CD28 transmembrance domain, a 4-1BB costimlatory domain, and a CD3z signaling domain. In some embodiments, the anti-CD19 CAR comprises FMC63. In some embodiments, the anti-CD19 CAR comprises Axicabtagene ciloleucel, Brexucabtagene autoleucel, Tisagenlecleucel, or Lisocabtagene maraleucel. In some embodiments, the CD19 binding domain is murine. In some embodiments, the CD19 binding domain is humanized. In some embodiments, the CD19 binding domain is human. In some embodiments, the anti-CD19 CAR comprises a CD19 binding domain that comprises an scFv.

[0795] In some embodiments, the anti-CD20 CAR comprises a VL domain and a VH domain from Table C9. In some embodiments, the anti-CD20 CAR comprises a CD20 binding domain from Table C9. In some embodiments, the anti-CD20 CAR comprises a CD20 CAR from Table C9. In some embodiments, the CD20 binding domain is murine. In some embodiments, the CD20 binding domain is humanized. In some embodiments, the CD20 binding domain is human. In some embodiments, the anti-CD20 CAR comprises a CD20 binding domain that comprises a scFv.

[0796] In some embodiments, the anti-GPRC5D CAR comprises a VL domain and a VH domain from Table C9. In some embodiments, the anti-GPRC5D CAR comprises a GPRC5D binding domain from Table C9. In some embodiments, the anti-GPRC5D CAR comprises a GPRC5D CAR from Table C9. In some embodiments, the GPRC5D binding domain is murine. In some embodiments, the GPRC5D binding domain is humanized. In some embodiments, the anti-GPRC5D CAR comprises a GPRC5D binding domain that comprises a scFv.

[0797] In some embodiments, the CAR comprises two antigen binding domains that target different antigens on the surface of a cell, e.g., a neoplastic cell, e.g., a blood cancer cell such as one associated with a leukemia, a lymphoma, or a multiple myeloma. In some embodiments, a CAR-T cell is engineered to comprise two CARs with antigen binding domains that target a different antigen on the surface of a cell, e.g., a neoplastic cell, e.g., a blood cancer cell such as one associated with a leukemia, a lymphoma, or a multiple myeloma. In some embodiments, the antigen binding domains of the CAR target CD20 and CD22. In some embodiments, the antigen binding domains of the CAR target CD19 and CD20. In some embodiments, the antigen binding domains of the CAR target CD19 and CD22. In some embodiments, the antigen binding domains of the CAR target GPRC5D and BCMA.

### CAR Compositions, Methods of Manufacture, and Uses

[0798] Additionally provided herein is a system for modifying DNA of a mammalian cell (e.g., a T cell, e.g., a cytotoxic, helper, or regulatory T cell, e.g., a primary T cell) to express a CAR, the system comprising:
[0799] (a) a gene modifying polypeptide or a nucleic acid (e.g., DNA or mRNA) encoding the gene modifying polypeptide, as disclosed herein, and
[0800] (b) a template RNA (or DNA encoding the template RNA) comprising (i) a sequence that binds the polypeptide and (ii) a heterologous object sequence encoding a chimeric antigen receptor (CAR), wherein the CAR comprises an antigen-binding domain, a transmembrane domain, a first intracellular signaling domain, and a second intracellular signaling domain, as disclosed herein.

[0801] In some embodiments, the system comprises:
[0802] (a) a gene modifying polypeptide or a nucleic acid (e.g., DNA or mRNA) encoding the gene modifying polypeptide, and
[0803] (b) a template RNA (or DNA encoding the template RNA) comprising (i) a sequence that binds the polypeptide and (ii) a heterologous object sequence encoding a chimeric antigen receptor (CAR), wherein one or more of:
[0804] (i) the CAR comprises an antigen binding domain that binds one or more antigens of a blood cancer (e.g., a leukemia or lymphoma), wherein optionally the antigen is a B cell antigen;
[0805] (ii) the CAR comprises an antigen binding domain that binds one or more antigens of a solid tumor;
[0806] (iii) the CAR comprise an antigen binding domain of any one of Tables C1-C5 or C9;
[0807] (iv) the CAR comprise a linker domain of Table L1 (e.g., a linker of SEQ ID NO 15520);
[0808] (v) the CAR comprises a transmembrane domain of Table C6 or C6A;
[0809] (vi) the CAR comprises a hinge domain (e.g., a hinge domain of Table C8);
[0810] (vii) the CAR comprises an intracellular signaling domain of Table C7 or C7A;
[0811] (viii) the CAR comprises a costimulatory domain of Table C7 or C7A;
[0812] (ix) the CAR comprises an antigen binding domain which comprises an scFv, a Fab, a diabody, a D domain binder, a centryin, or one or more single domain antibodies (e.g., VHH domains); or
[0813] (x) the CAR comprises an amino acid sequence of Table C9 or an amino acid sequence according to any one of SEQ ID NOs: 1100, 15490, 15492, 15498, 15500, 15502, 15503, 15505, 15507, 15509 and 15510, 15555, 15557 and 15558, 15559, 15560, 15561, 15515, 15526, 15531, 15536, 15541, or 15548;
[0814] (xi) wherein the CAR comprises a first intracellular signaling domain and a second intracellular signaling domain.

[0815] In some embodiments, provided herein are a population of cells comprising immune effector cells (e.g., T cells, e.g., primary T cells) or regulatory T cell (e.g., primary T reg cells) comprising a plurality of copies of a gene encoding a CAR (“a CAR gene”). In some embodiments, less than less than or equal to 70%, 65%, 60%, or 55% of copies of the CAR gene in the population are situated within a gene endogenous to a cell of the population. In some embodiments, less than 10%, 9%, 8%, 7%, 6%, or 5% of copies of the CAR gene in the population are situated within an exon of a gene endogenous to a cell of the population. In some embodiments, less than 70%, 65%, 60%, 55%, or 50% of copies of the CAR gene in the population are situated within an intron of a gene endogenous to a cell of the population. In some embodiments, less than 10%, 9%, 8%, or 7% of copies of the CAR gene in the population are situated upstream of a gene (e.g., within 2 kb of a transcriptional start site (TSS)) endogenous to a cell of the population. In some embodiments, at least 20%, 25%, 30%, 35%, or 40% of copies of the CAR gene in the population are situated within an intergenic region endogenous to a cell of the population.

[0816] In some embodiments, at least 50%, 55%, 60%, 65%, 70%, 75%, 80%, 85%, 90%, 95%, 96%, 97%, 98%, 99%, or 100% of cells in the plurality comprises a single copy of the CAR gene. In some embodiments, each cell in the plurality comprises a single copy of the CAR gene. In some embodiments, at least 0.1% of cells in the population comprise the CAR gene.

[0817] In some embodiments, the cell population comprises one or more of cancer cells, regulatory T cells, monocytes, and NK cells. In some embodiments, the immune effector cells and/or regulatory immune cells comprise T cells, e.g., primary T cells. In some embodiments, the immune effector cells or regulatory T cells comprise a leukapheresis sample or an apheresis sample. In some embodiments, the population of cells is substantially free of lentivirus proteins. In some embodiments, the population of cells is substantially free of lentivirus nucleic acids.

[0818] Additionally provided herein are methods of modifying a mammalian cell to express a CAR. In some embodiments, the method involves contacting the cell (e.g., an immune effector cell or a regulatory T cell) with a system disclosed herein. In some embodiments, the immune effector cell is a cell that expresses one or more Fc receptors and mediates one or more effector functions. In some embodiments, the immune effector cell may include, but may not be limited to, one or more of a monocyte, macrophage, neutrophil, dendritic cell, eosinophil, mast cell, platelet, large granular lymphocyte, Langerhans' cell, natural killer (NK) cell, T-lymphocyte (e.g., T-cell), a Gamma delta T cell, B-lymphocyte (e.g., B-cell) and may be from any organism including but not limited to humans, mice, rats, rabbits, and monkeys.

[0819] In some embodiments, the regulatory T cell (Treg) is a cell that suppresses an immune response, e.g., to mediate homeostasis and induce immune tolerance. In some embodiments, the Treg cell may include, but may not be limited to, a natural Treg or induced Treg and may be from any organism including but not limited to humans, mice, rats, rabbits, and monkeys.

[0820] In some embodiments, the mammalian cell is a T cell, e.g., a primary T cell. In some embodiments, provided herein is a method of modifying the genome of a mammalian T cell (e.g., a primary T cell), the method comprising contacting the cell with:
[0821] (a) a gene modifying polypeptide comprising an amino acid sequence of Table R1 or a sequence at least 70%, 75%, 80%, 85%, 90%, 95%, 96%, 97%, 98%, or 99% identical thereto, or a nucleic acid (e.g., DNA or mRNA) encoding the gene modifying polypeptide, and
[0822] (b) a template RNA (or DNA encoding the template RNA) comprising (i) a sequence that binds the polypeptide and (ii) a heterologous object sequence (e.g., encoding a CAR).

[0823] In some embodiments, provided herein is a method of modifying the genome of a mammalian T cell (e.g., a primary T cell), the method comprising contacting the cell with:
[0824] (a) a gene modifying polypeptide comprising an amino acid sequence of Table R1 or a sequence having no more than 10, 20, 30, 40, 50, 60, 70, 80, 90, or 100 amino acid differences thereto, or a nucleic acid (e.g., DNA or mRNA) encoding the gene modifying polypeptide, and
[0825] (b) a template RNA (or DNA encoding the template RNA) comprising (i) a sequence that binds the polypeptide and (ii) a heterologous object sequence (e.g., encoding a CAR).

[0826] In some embodiments, the method is performed ex vivo or in vitro.

[0827] Additionally provided herein is a reaction mixture comprising a gene modifying system disclosed herein (e.g., comprising a heterologous object sequence encoding a chimeric antigen receptor (CAR)) and a mammalian cell (e.g., a T cell, e.g., a primary T cell).

[0828] In some embodiments, the reaction mixture comprises a gene modifying polypeptide comprising an amino acid sequence of Table R1 or a sequence at least 70%, 75%, 80%, 85%, 90%, 95%, 96%, 97%, 98%, or 99% identical thereto, or a nucleic acid (e.g., DNA or mRNA) encoding the gene modifying polypeptide and a a mammalian T cell (e.g., a primary T cell). In some embodiments, the reaction mixture additionally includes a template RNA (or DNA encoding the template RNA) comprising (i) a sequence that binds the polypeptide and (ii) a heterologous object sequence.

[0829] In some embodiments, the reaction mixture comprises a gene modifying polypeptide comprising an amino acid sequence of Table R1 or a sequence no more than 10, 20, 30, 40, 50, 60, 70, 80, 90, or 100 amino acid differences thereto, or a nucleic acid (e.g., DNA or mRNA) encoding the gene modifying polypeptide and a mammalian T cell (e.g., a primary T cell). In some embodiments, the reaction mixture additionally includes a template RNA (or DNA encoding the template RNA) comprising (i) a sequence that binds the polypeptide and (ii) a heterologous object sequence.

[0830] In some embodiments, the systems, reaction mixtures, and cell populations modified using the methods disclosed herein can be used to treat a subject in need thereof. In some embodiments, the subject has a cancer, e.g., a hematological cancer or a solid tumor. In some embodiments, the subject has an infectious disease. In other embodiments, the subject has an autoimmune or an inflammatory disease.

### Compositions and Methods for Modifying Mammalian Cells

[0831] In some embodiments, provided herein are methods of modifying mammalian cells and reaction mixtures and systems for the same.

[0832] In some embodiments, provided herein is a method of modifying the genome of a mammalian T cell (e.g., a primary T cell), the method comprising contacting the cell with:
[0833] (a) a gene modifying polypeptide comprising an amino acid sequence of Table R1 or E14 or a sequence at least 70%, 75%, 80%, 85%, 90%, 95%, 96%, 97%, 98%, or 99% identical thereto, or a nucleic acid (e.g., DNA or mRNA) encoding the gene modifying polypeptide, and
[0834] (b) a template RNA (or DNA encoding the template RNA) comprising (i) a sequence that binds the polypeptide and (ii) a heterologous object sequence.

[0835] In some embodiments, provided herein is a method of modifying the genome of a mammalian T cell (e.g., a primary T cell), the method comprising contacting the cell with a system comprising:
[0836] (a) a gene modifying polypeptide comprising an amino acid sequence of Table R1 or E14 or a sequence having no more than 10, 20, 30, 40, 50, 60, 70, 80, 90, or 100 amino acid differences thereto, or a nucleic acid (e.g., DNA or mRNA) encoding the gene modifying polypeptide, and
[0837] (b) a template RNA (or DNA encoding the template RNA) comprising (i) a sequence that binds the polypeptide and (ii) a heterologous object sequence.

[0838] In some embodiments, the method is performed ex vivo or in vitro. In some embodiments, the gene modifying polypeptide and/or template RNA are formulated with an LNP.

[0839] In some embodiments, contacting the cell with the system results in insertion of the heterologous object sequence into at least 1%, 5%, 10%, 15%, 20%, 25%, or 30% of T cells.

[0840] Additionally provided herein is a reaction mixture comprising a gene modifying system disclosed herein (e.g., comprising a heterologous object sequence) and a mammalian cell (e.g., a T cell, e.g., a primary T cell).

[0841] In some embodiments, the reaction mixture comprises a gene modifying polypeptide comprising an amino acid sequence of Table R1 or E14 or a sequence at least 70%, 75%, 80%, 85%, 90%, 95%, 96%, 97%, 98%, or 99% identical thereto, or a nucleic acid (e.g., DNA or mRNA) encoding the gene modifying polypeptide and a mammalian T cell (e.g., a primary T cell). In some embodiments, the reaction mixture additionally includes a template RNA (or DNA encoding the template RNA) comprising (i) a sequence that binds the polypeptide and (ii) a heterologous object sequence.

[0842] In some embodiments, the reaction mixture comprises a gene modifying polypeptide comprising an amino acid sequence of Table R1 or E14 or a sequence no more than 10, 20, 30, 40, 50, 60, 70, 80, 90, or 100 amino acid differences thereto, or a nucleic acid (e.g., DNA or mRNA) encoding the gene modifying polypeptide and a mammalian T cell (e.g., a primary T cell). In some embodiments, the reaction mixture additionally includes a template RNA (or DNA encoding the template RNA) comprising (i) a sequence that binds the polypeptide and (ii) a heterologous object sequence.

[0843] Additionally provided herein is a population of T cells produced according to a method disclosed herein. In some embodiments, the population comprises a plurality of copies of the heterologous object sequence, wherein less than or equal to 70%, 65%, 60%, or 55% of copies of the heterologous object sequence in the population are situated within a gene endogenous to a cell of the population. In some embodiments, less than 10%, 9%, 8%, 7%, 6%, or 5% of copies of the heterologous object sequence in the population are situated within an exon of a gene endogenous to a cell of the population. In some embodiments, less than 70%, 65%, 60%, 55%, or 50% of copies of the heterologous object sequence in the population are situated within an intron of a gene endogenous to a cell of the population. In some embodiments, less than 10%, 9%, 8%, or 7% of copies of the heterologous object sequence in the population are situated upstream of a gene (e.g., within 2 kb of a transcriptional start site (TSS)) endogenous to a cell of the population. In some embodiments, at least 20%, 25%, 30%, 35%, or 40% of copies of the heterologous object sequence in the population are situated within an intergenic region endogenous to a cell of the population.

[0844] In some aspects, provided herein is a method of modifying the genome of a mammalian induced pluripotent stem cell (iPSC), the method comprising contacting the cell with:
[0845] (a) a gene modifying polypeptide, or a nucleic acid (e.g., DNA or mRNA) encoding the gene modifying polypeptide, and
[0846] (b) a template RNA (or DNA encoding the template RNA) comprising (i) a sequence that binds the polypeptide and (ii) a heterologous object sequence.

[0847] In some embodiments, the method results in insertion of the heterologous object sequence into at least 5%, 10%, or 15% of iPSCs.

[0848] In some aspects, provided herein is a method of modifying the genome of a mammalian iPSC, the method comprising contacting the cell with a system comprising:
[0849] (a) a gene modifying polypeptide comprising an amino acid sequence of Table R1 or E14 or a sequence having no more than 10, 20, 30, 40, 50, 60, 70, 80, 90, or 100 amino acid differences thereto, or a nucleic acid (e.g., DNA or mRNA) encoding the gene modifying polypeptide, and
[0850] (b) a template RNA (or DNA encoding the template RNA) comprising (i) a sequence that binds the polypeptide and (ii) a heterologous object sequence.

[0851] In some embodiments, the method is performed ex vivo or in vitro. In some embodiments, the gene modifying polypeptide and/or template RNA are formulated with an LNP.

[0852] In some embodiments, contacting the cell with the system results in insertion of the heterologous object sequence into at least 1%, 5%, 10%, 15%, 20%, 25%, or 30% of iPSCs.

[0853] Additionally provided herein is a reaction mixture comprising a gene modifying system disclosed herein (e.g., comprising a heterologous object sequence) and one or more iPSCs.

[0854] In some embodiments, the reaction mixture comprises a gene modifying polypeptide, or a nucleic acid (e.g., DNA or mRNA) encoding the gene modifying polypeptide and an iPSC. In some embodiments, the reaction mixture further comprises a template RNA (or DNA encoding the template RNA) comprising (i) a sequence that binds the polypeptide and (ii) a heterologous object sequence.

[0855] In some embodiments, the reaction mixture comprises a gene modifying polypeptide comprising an amino acid sequence of Table R1 or E14 or a sequence at least 70%, 75%, 80%, 85%, 90%, 95%, 96%, 97%, 98%, or 99% identical thereto, or a nucleic acid (e.g., DNA or mRNA) encoding the gene modifying polypeptide and an iPSC. In some embodiments, the reaction mixture additionally includes a template RNA (or DNA encoding the template RNA) comprising (i) a sequence that binds the polypeptide and (ii) a heterologous object sequence.

[0856] In some embodiments, the reaction mixture comprises a gene modifying polypeptide comprising an amino acid sequence of Table R1 or E14 or a sequence no more than 10, 20, 30, 40, 50, 60, 70, 80, 90, or 100 amino acid differences thereto, or a nucleic acid (e.g., DNA or mRNA) encoding the gene modifying polypeptide and an iPSC. In some embodiments, the reaction mixture additionally includes a template RNA (or DNA encoding the template RNA) comprising (i) a sequence that binds the polypeptide and (ii) a heterologous object sequence.

[0857] Additionally provided herein is a population of iPSCs produced according to a method disclosed herein. In some embodiments, the population comprises a plurality of copies of the heterologous object sequence, wherein less than or equal to 70%, 65%, 60%, or 55% of copies of the heterologous object sequence in the population are situated within a gene endogenous to a cell of the population. In some embodiments, less than 10%, 9%, 8%, 7%, 6%, or 5% of copies of the heterologous object sequence in the population are situated within an exon of a gene endogenous to a cell of the population. In some embodiments, less than 70%, 65%, 60%, 55%, or 50% of copies of the heterologous object sequence in the population are situated within an intron of a gene endogenous to a cell of the population. In some embodiments, less than 10%, 9%, 8%, or 7% of copies of the heterologous object sequence in the population are situated upstream of a gene (e.g., within 2 kb of a transcriptional start site (TSS)) endogenous to a cell of the population. In some embodiments, at least 20%, 24%, 30%, 35%, or 40% of copies of the heterologous object sequence in the population are situated within an intergenic region endogenous to a cell of the population.

[0858] In some aspects, provided herein is a method of modifying the genome of a mammalian respiratory epithelial cell (e.g., a bronchial epithelial cell, e.g., a human bronchial epithelial (hBE) cell), the method comprising contacting the cell with:
[0859] (a) a gene modifying polypeptide, or a nucleic acid (e.g., DNA or mRNA) encoding the gene modifying polypeptide, and
[0860] (b) a template RNA (or DNA encoding the template RNA) comprising (i) a sequence that binds the polypeptide and (ii) a heterologous object sequence.

[0861] In some embodiments, the method results in insertion of the heterologous object sequence into at least 5%, 10%, 15%, 20%, 30%, 40%, 50%, 60%, or 70% of respiratory epithelial cells (e.g., bronchial epithelial cells, e.g., human bronchial epithelial (hBE) cells).

[0862] In some aspects, provided herein is a method of modifying the genome of a mammalian respiratory epithelial cell (e.g., a bronchial epithelial cell, e.g., a human bronchial epithelial (hBE) cell), the method comprising contacting the cell with a system comprising:
[0863] (a) a gene modifying polypeptide comprising an amino acid sequence of Table R1 or E14 or a sequence having no more than 10, 20, 30, 40, 50, 60, 70, 80, 90, or 100 amino acid differences thereto, or a nucleic acid (e.g., DNA or mRNA) encoding the gene modifying polypeptide, and
[0864] (b) a template RNA (or DNA encoding the template RNA) comprising (i) a sequence that binds the polypeptide and (ii) a heterologous object sequence.

[0865] In some embodiments, the method is performed ex vivo or in vitro. In some embodiments, the gene modifying polypeptide and/or template RNA are formulated with an LNP.

[0866] In some embodiments, contacting the cell with the system results in insertion of the heterologous object sequence into at least 1%, 5%, 10%, 15%, 20%, 25%, 30%, 40%, 50%, 60%, or 70% of respiratory epithelial cells (e.g., bronchial epithelial cells, e.g., human bronchial epithelial (hBE) cells).

[0867] Additionally provided herein is a reaction mixture comprising a gene modifying system disclosed herein (e.g., comprising a heterologous object sequence) and one or more respiratory epithelial cells (e.g., bronchial epithelial cells, e.g., human bronchial epithelial (hBE) cells).

[0868] In some embodiments, the reaction mixture comprises a gene modifying polypeptide, or a nucleic acid (e.g., DNA or mRNA) encoding the gene modifying polypeptide, and a respiratory epithelial cell (e.g., a bronchial epithelial cell, e.g., a human bronchial epithelial (hBE) cell). In some embodiments, the reaction mixture further comprises a template RNA (or DNA encoding the template RNA) comprising (i) a sequence that binds the polypeptide and (ii) a heterologous object sequence.

[0869] In some embodiments, the reaction mixture comprises a gene modifying polypeptide comprising an amino acid sequence of Table R1 or E14 or a sequence at least 70%, 75%, 80%, 85%, 90%, 95%, 96%, 97%, 98%, or 99% identical thereto, or a nucleic acid (e.g., DNA or mRNA) encoding the gene modifying polypeptide, and a respiratory epithelial cell (e.g., a bronchial epithelial cell, e.g., a human bronchial epithelial (hBE) cell). In some embodiments, the reaction mixture additionally includes a template RNA (or DNA encoding the template RNA) comprising (i) a sequence that binds the polypeptide and (ii) a heterologous object sequence.

[0870] In some embodiments, the reaction mixture comprises a gene modifying polypeptide comprising an amino acid sequence of Table R1 or E14 or a sequence no more than 10, 20, 30, 40, 50, 60, 70, 80, 90, or 100 amino acid differences thereto, or a nucleic acid (e.g., DNA or mRNA) encoding the gene modifying polypeptide, and a respiratory epithelial cell (e.g., a bronchial epithelial cell, e.g., a human bronchial epithelial (hBE) cell). In some embodiments, the reaction mixture additionally includes a template RNA (or DNA encoding the template RNA) comprising (i) a sequence that binds the polypeptide and (ii) a heterologous object sequence.

[0871] In some embodiments, modifying a genome of a cell (e.g., a primary cell, e.g., a T cell or an IPSC) using a gene modifying system does not result in activation of the endogenous DNA damage response (DDR) pathway. In some embodiments, modifying a genome of a cell (e.g., a primary cell, e.g., an IPSC) using a gene modifying system results in activation of the cell's endogenous DDR pathway less than in an otherwise similar cell treated with Cas9, e.g., in an assay according to Example 2.

[0872] In some embodiments, modifying a genome of a cell (e.g., a primary cell, e.g., a T cell or an IPSC) using a gene modifying system does not result in activation of the endogenous interferon response. In some embodiments, modifying a genome of a cell (e.g., a primary cell, e.g., a T cell or an IPSC) using a gene modifying system results in activation of the cell's interferon response less than in an otherwise similar cell treated with a gene modifying system comprising elements from a LINE-1 retrotransposase, e.g., in an assay according to Example 3.

### Suitable Indications

[0873] Exemplary suitable diseases and disorders that can be treated by the systems or methods provided herein, for example, those comprising gene modifying systems, include, without limitation: Baraitser-Winter syndromes 1 and 2; Diabetes mellitus and insipidus with optic atrophy and deafness; Alpha-1-antitrypsin deficiency; Heparin cofactor II deficiency; Adrenoleukodystrophy; Keppen-Lubinsky syndrome; Treacher collins syndrome 1; Mitochondrial complex I, II, III, III (nuclear type 2, 4, or 8) deficiency; Hypermanganesemia with dystonia, polycythemia and cirrhosis; Carcinoid tumor of intestine; Rhabdoid tumor predisposition syndrome 2; Wilson disease; Hyperphenylalaninemia, bh4-deficient, a, due to partial pts deficiency, BH4-deficient, D, and non-pku; Hyperinsulinemic hypoglycemia familial 3, 4, and 5; Keratosis follicularis; Oral-facial-digital syndrome; SeSAME syndrome; Deafness, nonsyndromic sensorineural, mitochondrial; Proteinuria; Insulin-dependent diabetes mellitus secretory diarrhea syndrome; Moyamoya disease 5; Diamond-Blackfan anemia 1, 5, 8, and 10; Pseudoachondroplastic spondyloepiphyseal dysplasia syndrome; Brittle cornea syndrome 2; Methylmalonic acidemia with homocystinuria; Adams-Oliver syndrome 5 and 6; autosomal recessive Agammaglobulinemia 2; Cortical malformations, occipital; Febrile seizures, familial, 11; Mucopolysaccharidosis type VI, type VI (severe), and type VII; Marden Walker like syndrome; Pseudoneonatal adrenoleukodystrophy; Spheroid body myopathy; Cleidocranial dysostosis; Multiple Cutaneous and Mucosal Venous Malformations; Liver failure acute infantile; Neonatal intrahepatic cholestasis caused by citrin deficiency; Ventricular septal defect 1; Oculodentodigital dysplasia; Wilms tumor 1; Weill-Marchesani-like syndrome; Renal adysplasia; Cataract 1, 4, autosomal dominant, autosomal dominant, multiple types, with microcornea, coppock-like, juvenile, with microcornea and glucosuria, and nuclear diffuse nonprogressive; Odontohypophosphatasia; Cerebro-oculo-facio-skeletal syndrome; Schizophrenia 15; Cerebral amyloid angiopathy, APP-related; Hemophagocytic lymphohistiocytosis, familial, 3; Porphobilinogen synthase deficiency; Episodic ataxia type 2; Trichorhinophalangeal syndrome type 3; Progressive familial heart block type IB; Glioma susceptibility 1; Lichtenstein-Knorr Syndrome; Hypohidrotic X-linked ectodermal dysplasia; Bartter syndrome types 3, 3 with hypocalciuria, and 4; Carbonic anhydrase VA deficiency, hyperammonemia due to; Cardiomyopathy; Poikiloderma, hereditary fibrosing, with tendon contractures, myopathy, and pulmonary fibrosis; Combined d-2- and 1-2-hydroxyglutaric aciduria; Arginase deficiency; Cone-rod dystrophy 2 and 6; Smith-Lemli-Opitz syndrome; Mucolipidosis III Gamma; Blau syndrome; Werner syndrome; Meningioma; Iodotyrosyl coupling defect; Dubin-Johnson syndrome; 3-Oxo-5 alpha-steroid delta 4-dehydrogenase deficiency; Boucher Neuhauser syndrome; Iron accumulation in brain; Mental Retardation, X-Linked 102 and syndromic 13; familial, Pituitary adenoma predisposition; Hypoplasia of the corpus callosum; Hyperalphalipoproteinemia 2; Deficiency of ferroxidase; Growth hormone insensitivity with immunodeficiency; Marinesco-Sj\xc3\xb6gren syndrome; Martsolf syndrome; Gaze palsy, familial horizontal, with progressive scoliosis; Mitchell-Riley syndrome; Hypocalciuric hypercalcemia, familial, types 1 and 3; Rubinstein-Taybi syndrome; Epstein syndrome; Juvenile retinoschisis; Becker muscular dystrophy; Loeys-Dietz syndrome 1, 2, 3; Congenital muscular hypertrophy-cerebral syndrome; Familial juvenile gout; Spermatogenic failure 11, 3, and 8; Orofacial cleft 11 and 7, Cleft lip/palate-ectodermal dysplasia syndrome; Mental retardation, X-linked, nonspecific, syndromic, Hedera type, and syndromic, wu type; Combined oxidative phosphorylation deficiencies 1, 3, 4, 12, 15, and 25; Frontotemporal dementia; Kniest dysplasia; Familial cardiomyopathy; Benign familial hematuria; Pheochromocytoma; Aminoglycoside-induced deafness; Gamma-aminobutyric acid transaminase deficiency; Oculocutaneous albinism type IB, type 3, and type 4; Renal coloboma syndrome; CNS hypomyelination; Hennekam lymphangiectasia-lymphedema syndrome 2; Migraine, familial basilar; Distal spinal muscular atrophy, X-linked 3; X-linked periventricular heterotopia; Microcephaly; Mucopolysaccharidosis, MPS-I-H/S, MPS-II, MPS-III-A, MPS-III-B, MPS-III-C, MPS-IV-A, MPS-IV-B; Infantile Parkinsonism-dystonia; Frontotemporal dementia with TDP43 inclusions, TARDBP-related; Hereditary diffuse gastric cancer; Sialidosis type I and II; Microcephaly-capillary malformation syndrome; Hereditary breast and ovarian cancer syndrome; Brain small vessel disease with hemorrhage; Non-ketotic hyperglycinemia; Navajo neurohepatopathy; Auriculocondylar syndrome 2; Spastic paraplegia 15, 2, 3, 35, 39, 4, autosomal dominant, 55, autosomal recessive, and 5A; Autosomal recessive cutis laxa type IA and IB; Hemolytic anemia, nonspherocytic, due to glucose phosphate isomerase deficiency; Hutchinson-Gilford syndrome; Familial amyloid nephropathy with urticaria and deafness; Supravalvar aortic stenosis; Diffuse palmoplantar keratoderma, Bothnian type; Holt-Oram syndrome; Coffin Siris/Intellectual Disability; Left-right axis malformations; Rapadilino syndrome; Nanophthalmos 2; Craniosynostosis and dental anomalies; Paragangliomas 1; Snyder Robinson syndrome; Ventricular fibrillation; Activated PI3K-delta syndrome; Howel-Evans syndrome; Larsen syndrome, dominant type; Van Maldergem syndrome 2; MYH-associated polyposis; 6-pymvoyl-tetrahydropterin synthase deficiency; Alagille syndromes 1 and 2; Lymphangiomyomatosis; Muscle eye brain disease; WFS1-Related Disorders; Primary hypertrophic osteoarthropathy, autosomal recessive 2; Infertility; Nestor-Guillermo progeria syndrome; Mitochondrial trifunctional protein deficiency; Hypoplastic left heart syndrome 2; Primary dilated cardiomyopathy; Retinitis pigmentosa; Hirschsprung disease 3; Upshaw-Schulman syndrome; Desbuquois dysplasia 2; Diarrhea 3 (secretory sodium, congenital, syndromic) and 5 (with tufting enteropathy, congenital); Pachyonychia congenita 4 and type 2; Cerebral autosomal dominant and recessive arteriopathy with subcortical infarcts and leukoencephalopathy; Vi tel 1i form dystrophy; type II, type IV, IV (combined hepatic and myopathic), type V, and type VI; Atypical Rett syndrome; Atrioventricular septal defect 4; Papillon-Lef\xc3\xa8vre syndrome; Leber amaurosis; X-linked hereditary motor and sensory neuropathy; Progressive sclerosing poliodystrophy; Goldmann-Favre syndrome; Renal-hepatic-pancreatic dysplasia; Pallister-Hall syndrome; Amyloidogenic transthyretin amyloidosis; Melnick-Needles syndrome; Hyperimmunoglobulin E syndrome; Posterior column ataxia with retinitis pigmentosa; Chondrodysplasia punctata 1, X-linked recessive and 2 X-linked dominant; Ectopia lentis, isolated autosomal recessive and dominant; Familial cold urticarial; Familial adenomatous polyposis 1 and 3; Porokeratosis 8, disseminated superficial actinic type; PIK3CA Related Overgrowth Spectrum; Cerebral cavernous malformations 2; Exudative vitreoretinopathy 6; Megalencephaly cutis marmorata telangiectatica congenital; TARP syndrome; Diabetes mellitus, permanent neonatal, with neurologic features; Short-rib thoracic dysplasia 11 or 3 with or without polydactyly; Hypertrichotic osteochondrodysplasia; beta Thalassemia; Niemann-Pick disease type C1, C2, type A, and type C1, adult form; Charcot-Marie-Tooth disease types IB, 2B2, 2C, 2F, 21, 2U (axonal), 1C (demyelinating), dominant intermediate C, recessive intermediate A, 2A2, 4C, 4D, 4H, IF, IVF, and X; Tyrosinemia type I; Paroxysmal atrial fibrillation; UV-sensitive syndrome; Tooth agenesis, selective, 3 and 4; Merosin deficient congenital muscular dystrophy; Long-chain 3-hydroxyacyl-CoA dehydrogenase deficiency; Congenital aniridia; Left ventricular noncompaction 5; Deficiency of aromatic-L-amino-acid decarboxylase; Coronary heart disease; Leukonychia totalis; Distal arthrogryposis type 2B; Retinitis pigmentosa 10, 11, 12, 14, 15, 17, and 19; Robinow Sorauf syndrome; Tenorio Syndrome; Prolactinoma; Neurofibromatosis, type land type 2; Congenital muscular dystrophy-dystroglycanopathy with brain and eye anomalies, types A2, A7, A8, A11, and A14; Heterotaxy, visceral, 2, 4, and 6, autosomal; Jankovic Rivera syndrome; Lipodystrophy, familial partial, type 2 and 3; Hemoglobin H disease, nondeletional; Multicentric osteolysis, nodulosis and arthropathy; Thyroid agenesis; deficiency of Acyl-CoA dehydrogenase family, member 9; Alexander disease; Phytanic acid storage disease; Breast-ovarian cancer, familial 1, 2, and 4; Proline dehydrogenase deficiency; Childhood hypophosphatasia; Pancreatic agenesis and congenital heart disease; Vitamin D-dependent rickets, types land 2; Iridogoniodysgenesis dominant type and type 1; Autosomal recessive hypohidrotic ectodermal dysplasia syndrome; Mental retardation, X-linked, 3, 21, 30, and 72; Hereditary hemorrhagic telangiectasia type 2; Blepharophimosis, ptosis, and epicanthus inversus; Adenine phosphoribosyltransferase deficiency; Seizures, benign familial infantile, 2; Acrodysostosis 2, with or without hormone resistance; Tetralogy of Fallot; Retinitis pigmentosa 2, 20, 25, 35, 36, 38, 39, 4, 40, 43, 45, 48, 66, 7, 70, 72; Lysosomal acid lipase deficiency; Eichsfeld type congenital muscular dystrophy; Walker-Warburg congenital muscular dystrophy; TNF receptor-associated periodic fever syndrome (TRAPS); Progressive myoclonus epilepsy with ataxia; Epilepsy, childhood absence 2, 12 (idiopathic generalized, susceptibility to) 5 (nocturnal frontal lobe), nocturnal frontal lobe type 1, partial, with variable foci, progressive myoclonic 3, and X-linked, with variable learning disabilities and behavior disorders; Long QT syndrome; Dicarboxylic aminoaciduria; Brachydactyly types A1 and A2; Pseudoxanthoma elasticum-like disorder with multiple coagulation factor deficiency; Multisystemic smooth muscle dysfunction syndrome; Syndactyly Cenani Lenz type; Joubert syndrome 1, 6, 7, 9/15 (digenic), 14, 16, and 17, and Orofaciodigital syndrome xiv; Digitorenocerebral syndrome; Retinoblastoma; Dyskinesia, familial, with facial myokymia; Hereditary sensory and autonomic neuropathy type IIB and IIA; familial hyperinsulinism; Megalencephalic leukoencephalopathy with subcortical cysts land 2a; Aase syndrome; Wiedemann-Steiner syndrome; Ichthyosis exfoliativa; Myotonia congenital; Granulomatous disease, chronic, X-linked, variant; Deficiency of 2-methylbutyryl-CoA dehydrogenase; Sarcoidosis, early-onset; Glaucoma, congenital and Glaucoma, congenital, Coloboma; Breast cancer, susceptibility to; Ceroid lipofuscinosis neuronal 2, 6, 7, and 10; Congenital generalized lipodystrophy type 2; Fructose-biphosphatase deficiency; Congenital contractural arachnodactyly; Lynch syndrome I and II; Phosphoglycerate dehydrogenase deficiency; Burn-Mckeown syndrome; Myocardial infarction 1; Achromatopsia 2 and 7; Retinitis Pigmentosa 73; Protan defect; Polymicrogyria, asymmetric, bilateral frontoparietal; Spinal muscular atrophy, distal, autosomal recessive, 5; Methylmalonic aciduria due to methylmalonyl-CoA mutase deficiency; Familial porencephaly; Hurler syndrome; Oto-palato-digital syndrome, types I and II; Sotos syndrome 1 or 2; Cardioencephalomyopathy, fatal infantile, due to cytochrome c oxidase deficiency; Parastremmatic dwarfism; Thyrotropin releasing hormone resistance, generalized; Diabetes mellitus, type 2, and insulin-dependent, 20; Thoracic aortic aneurysms and aortic dissections; Estrogen resistance; Maple syrup urine disease type 1A and type 3; Hypospadias 1 and 2, X-linked; Metachromatic leukodystrophy juvenile, late infantile, and adult types; Early T cell progenitor acute lymphoblastic leukemia; Neuropathy, Hereditary Sensory, Type IC; Mental retardation, autosomal dominant 31; Retinitis pigmentosa 39; Breast cancer, early-onset; May-Hegglin anomaly; Gaucher disease type 1 and Subacute neuronopathic; Temtamy syndrome; Spinal muscular atrophy, lower extremity predominant 2, autosomal dominant; Fanconi anemia, complementation group E, I, N, and O; Alkaptonuria; Hirschsprung disease; Combined malonic and methylmalonic aciduria; Arrhythmogenic right ventricular cardiomyopathy types 5, 8, and 10; Congenital lipomatous overgrowth, vascular malformations, and epidermal nevi; Timothy syndrome; Deficiency of guanidinoacetate methyltransferase; Myoclonic dystonia; Kanzaki disease; Neutral 1 amino acid transport defect; Neurohypophyseal diabetes insipidus; Thyroid hormone metabolism, abnormal; Benign scapuloperoneal muscular dystrophy with cardiomyopathy; Hypoglycemia with deficiency of glycogen synthetase in the liver; Hypertrophic cardiomyopathy; Myasthenic Syndrome, Congenital, 11, associated with acetylcholine receptor deficiency; Mental retardation X-linked syndromic 5; Stormorken syndrome; Aplastic anemia; Intellectual disability; Normokalemic periodic paralysis, potassium-sensitive; Danon disease; Nephronophthisis 13, 15 and 4; Thyrotoxic periodic paralysis and Thyrotoxic periodic paralysis 2; Infertility associated with multi-tailed spermatozoa and excessive DNA; Glaucoma, primary open angle, juvenile-onset; Afibrinogenemia and congenital Afibrinogenemia; Polycystic kidney disease 2, adult type, and infantile type; Familial porphyria cutanea tarda; Cerebello-oculo-renal syndrome (nephronophthisis, oculomotor apraxia and cerebellar abnormalities); Frontotemporal Dementia Chromosome 3-Linked and Frontotemporal dementia ubiquitin-positive; Metatrophic dysplasia; Immunodeficiency-centromeric instability-facial anomalies syndrome 2; Anemia, nonspherocytic hemolytic, due to G6PD deficiency; Bronchiectasis with or without elevated sweat chloride 3; Congenital myopathy with fiber type disproportion; Carney complex, type 1; Cryptorchidism, unilateral or bilateral; Ichthyosis bullosa of Siemens; Isolated lutropin deficiency; DFNA 2 Nonsyndromic Hearing Loss; Klein-Waardenberg syndrome; Gray platelet syndrome; Bile acid synthesis defect, congenital, 2; 46, XY sex reversal, type 1, 3, and 5; Acute intermittent porphyria; Cornelia de Fange syndromes 1 and 5; Hyperglycinuria; Cone-rod dystrophy 3; Dysfibrinogenemia; Karak syndrome; Congenital muscular dystrophy-dystroglycanopathy without mental retardation, type B5; Infantile nystagmus, X-linked; Dyskeratosis congenita, autosomal recessive, 1, 3, 4, and 5; Microcephaly with or without chorioretinopathy, lymphedema, or mental retardation; Hyperlysinemia; Bardet-Biedl syndromes 1, 11, 16, and 19; Autosomal recessive centronuclear myopathy; Frasier syndrome; Caudal regression syndrome; Fibrosis of extraocular muscles, congenital, 1, 2, 3a (with or without extraocular involvement), 3b; Prader-Willi-like syndrome; Malignant melanoma; Bloom syndrome; Darier disease, segmental; Multicentric osteolysis nephropathy; Hemochromatosis type 1, 2B, and 3; Cerebellar ataxia infantile with progressive external ophthalmoplegi and Cerebellar ataxia, mental retardation, and dysequilibrium syndrome 2; Hypoplastic left heart syndrome; Epilepsy, Hearing Loss, And Mental Retardation Syndrome; Transferrin serum level quantitative trait locus 2; Ocular albinism, type I; Marfan syndrome; Congenital muscular dystrophy-dystroglycanopathy with brain and eye anomalies, type A14 and B14; Hyperammonemia, type III; Cryptophthalmos syndrome; Alopecia universalis congenital; Adult hypophosphatasia; Mannose-binding protein deficiency; Bull eye macular dystrophy; Autosomal dominant torsion dystonia 4; Nephrotic syndrome, type 3, type 5, with or without ocular abnormalities, type 7, and type 9; Seizures, Early infantile epileptic encephalopathy 7; Persistent hyperinsulinemic hypoglycemia of infancy; Thrombocytopenia, X-linked; Neonatal hypotonia; Orstavik Lindemann Solberg syndrome; Pulmonary hypertension, primary, 1, with hereditary hemorrhagic telangiectasia; Pituitary dependent hypercortisolism; Epidermodysplasia verruciformis; Epidermolysis bullosa, junctional, localisata variant; Cytochrome c oxidase i deficiency; Kindler syndrome; Myosclerosis, autosomal recessive; Truncus arteriosus; Duane syndrome type 2; ADULT syndrome; Zellweger syndrome spectrum; Leukoencephalopathy with ataxia, with Brainstem and Spinal Cord Involvement and Lactate Elevation, with vanishing white matter, and progressive, with ovarian failure; Antithrombin III deficiency; Holoprosencephaly 7; Roberts-SC phocomelia syndrome; Mitochondrial DNA-depletion syndrome 3 and 7, hepatocerebral types, and 13 (encephalomyopathic type); Porencephaly 2; Microcephaly, normal intelligence and immunodeficiency; Giant axonal neuropathy; Sturge-Weber syndrome, Capillary malformations, congenital, 1; Fabry disease and Fabry disease, cardiac variant; Glutamate formiminotransferase deficiency; Fanconi-Bickel syndrome; Acromicric dysplasia; Epilepsy, idiopathic generalized, susceptibility to, 12, Basal ganglia calcification, idiopathic, 4; Polyglucosan body myopathy 1 with or without immunodeficiency; Malignant tumor of prostate; Congenital ectodermal dysplasia of face; Congenital heart disease; Age-related macular degeneration 3, 6, 11, and 12; Congenital myotonia, autosomal dominant and recessive forms; Hypomagnesemia 1, intestinal; Sulfite oxidase deficiency, isolated; Pick disease; Plasminogen deficiency, type I; Syndactyly type 3; Cone-rod dystrophy amelogenesis imperfecta; Pseudoprimary hyperaldosteronism; Terminal osseous dysplasia; Bartter syndrome antenatal type 2; Congenital muscular dystrophy-dystroglycanopathy with mental retardation, types B2, B3, B5, and B15; Familial infantile myasthenia; Lymphoproliferative syndrome 1, 1 (X-linked), and 2; Hypercholesterolaemia and Hypercholesterolemia, autosomal recessive; Neoplasm of ovary; Infantile GM1 gangliosidosis; Syndromic X-linked mental retardation 16; Deficiency of ribose-5-phosphate isomerase; Alzheimer disease, types, 1, 3, and 4; Andersen Tawil syndrome; Multiple synostoses syndrome 3; Chilbain lupus 1; Hemophagocytic lymphohistiocytosis, familial, 2; Axenfeld-Rieger syndrome type 3; Myopathy, congenital with cores; Osteoarthritis with mild chondrodysplasia; Peroxisome biogenesis disorders; Severe congenital neutropenia; Hereditary neuralgic amyotrophy; Palmoplantar keratoderma, nonepidermolytic, focal or diffuse; Dysplasminogenemia; Familial colorectal cancer; Spastic ataxia 5, autosomal recessive, Charlevoix-Saguenay type, 1, 10, or 11, autosomal recessive; Frontometaphyseal dysplasia land 3; Hereditary factors II, IX, VIII deficiency disease; Spondylocheirodysplasia, Ehlers-Danlos syndrome-like, with immune dysregulation, Aggrecan type, with congenital joint dislocations, short limb-hand type, Sedaghatian type, with cone-rod dystrophy, and Kozlowski type; Ichthyosis prematurity syndrome; Stickler syndrome type 1; Focal segmental glomerulosclerosis 5; 5-Oxoprolinase deficiency; Microphthalmia syndromic 5, 7, and 9; Juvenile polyposis/hereditary hemorrhagic telangiectasia syndrome; Deficiency of butyryl-CoA dehydrogenase; Maturity-onset diabetes of the young, type 2; Mental retardation, syndromic, Claes-Jensen type, X-linked; Deafness, cochlear, with myopia and intellectual impairment, without vestibular involvement, autosomal dominant, X-linked 2; Spondylocarpotarsal synostosis syndrome; Sting-associated vasculopathy, infantile-onset; Neutral lipid storage disease with myopathy; Immune dysfunction with T-cell inactivation due to calcium entry defect 2; Cardiofaciocutaneous syndrome; Corticosterone methyloxidase type 2 deficiency; Hereditary myopathy with early respiratory failure; Interstitial nephritis, karyomegalic; Trimethylaminuria; Hyperimmunoglobulin D with periodic fever; Malignant hyperthermia susceptibility type 1; Trichomegaly with mental retardation, dwarfism and pigmentary degeneration of retina; Breast adenocarcinoma; Complement factor B deficiency; Ullrich congenital muscular dystrophy; Left ventricular noncompaction cardiomyopathy; Fish-eye disease; Finnish congenital nephrotic syndrome; Limb-girdle muscular dystrophy, type IB, 2A, 2B, 2D, C1, C5, C9, C14; Idiopathic fibrosing alveolitis, chronic form; Primary familial hypertrophic cardiomyopathy; Angiotensin i-converting enzyme, benign serum increase; Cd8 deficiency, familial; Proteus syndrome; Glucose-6-phosphate transport defect; Borjeson-Forssman-Lehmann syndrome; Zellweger syndrome; Spinal muscular atrophy, type II; Prostate cancer, hereditary, 2; Thrombocytopenia, platelet dysfunction, hemolysis, and imbalanced globin synthesis; Congenital disorder of glycosylation types IB, ID, IG, 1H, 1 J, IK, IN, IP, 2C, 2J, 2K, Ilm; Junctional epidermolysis bullosa gravis of Herlitz; Generalized epilepsy with febrile seizures plus 3, type 1, type 2; Schizophrenia 4; Coronary artery disease, autosomal dominant 2; Dyskeratosis congenita, autosomal dominant, 2 and 5; Subcortical laminar heterotopia, X-linked; Adenylate kinase deficiency; X-linked severe combined immunodeficiency; Coproporphyria; Amyloid Cardiomyopathy, Transthyretin-related; Hypocalcemia, autosomal dominant 1; Brugada syndrome; Congenital myasthenic syndrome, acetazolamide-responsive; Primary hypomagnesemia; Sclerosteosis; Frontotemporal dementia and/or amyotrophic lateral sclerosis 3 and 4; Mevalonic aciduria; Schwannomatosis 2; Hereditary motor and sensory neuropathy with optic atrophy; Porphyria cutanea tarda; Osteochondritis dissecans; Seizures, benign familial neonatal, 1, and/or myokymia; Long QT syndrome, LQT1 subtype; Mental retardation, anterior maxillary protrusion, and strabismus; Idiopathic hypercalcemia of infancy; Hypogonadotropic hypogonadism 11 with or without anosmia; Polycystic lipomembranous osteodysplasia with sclerosing leukoencephalopathy; Primary autosomal recessive microcephaly 10, 2, 3, and 5; Interrupted aortic arch; Congenital amegakaryocytic thrombocytopenia; Hermansky-Pudlak syndrome 1, 3, 4, and 6; Long QT syndrome 1, 2, 2/9, 2/5, (digenic), 3, 5 and 5, acquired, susceptibility to; Andermann syndrome; Retinal cone dystrophy 3B; Erythropoietic protoporphyria; Sepiapterin reductase deficiency; Very long chain acyl-CoA dehydrogenase deficiency; Hyperferritinemia cataract syndrome; Silver spastic paraplegia syndrome; Charcot-Marie-Tooth disease; Atrial septal defect 2; Carnevale syndrome; Hereditary insensitivity to pain with anhidrosis; Catecholaminergic polymorphic ventricular tachycardia; Hypokalemic periodic paralysis 1 and 2; Sudden infant death syndrome; Hypochromic microcytic anemia with iron overload; GLUT1 deficiency syndrome 2; Leukodystrophy, Hypomyelinating, 11 and 6; Cone monochromatism; Osteopetrosis autosomal dominant type 1 and 2, recessive 4, recessive 1, recessive 6; Severe congenital neutropenia 3, autosomal recessive or dominant; Methionine adenosyltransferase deficiency, autosomal dominant; Paroxysmal familial ventricular fibrillation; Pyruvate kinase deficiency of red cells; Schneckenbecken dysplasia; Torsades de pointes; Distal myopathy Markesbery-Griggs type; Deficiency of UDPglucose-hexose-1-phosphate uridylyltransferase; Sudden cardiac death; Neu-Laxova syndrome 1; Atransferrinemia; Hyperparathyroidism 1 and 2; Cutaneous malignant melanoma 1; Symphalangism, proximal, lb; Progressive pseudorheumatoid dysplasia; Werdnig-Hoffmann disease; Achondrogenesis type 2; Holoprosencephaly 2, 3, 7, and 9; Schindler disease, type 1; Cerebroretinal microangiopathy with calcifications and cysts; Heterotaxy, visceral, X-linked; Tuberous sclerosis syndrome; Kartagener syndrome; Thyroid hormone resistance, generalized, autosomal dominant; Bestrophinopathy, autosomal recessive; Nail disorder, nonsyndromic congenital, 8; Mohr-Tranebjaerg syndrome; Cone-rod dystrophy 12; Hearing impairment; Ovarioleukodystrophy; Renal tubular acidosis, proximal, with ocular abnormalities and mental retardation; Dihydropteridine reductase deficiency; Focal epilepsy with speech disorder with or without mental retardation; Ataxia-telangiectasia syndrome; Brown-Vialetto-Van laere syndrome and Brown-Vialetto-Van Laere syndrome 2; Cardiomyopathy; Peripheral demyelinating neuropathy, central dysmyelination; Corneal dystrophy, Fuchs endothelial, 4; Cowden syndrome 3; Dystonia 2 (torsion, autosomal recessive), 3 (torsion, X-linked), 5 (Dopa-responsive type), 10, 12, 16, 25, 26 (Myoclonic); Epiphyseal dysplasia, multiple, with myopia and conductive deafness; Cardiac conduction defect, nonspecific; Branchiootic syndromes 2 and 3; Peroxisome biogenesis disorder 14B, 2A, 4A, 5B, 6A, 7A, and 7B; Familial renal glucosuria; Candidiasis, familial, 2, 5, 6, and 8; Autoimmune disease, multisystem, infantile-onset; Early infantile epileptic encephalopathy 2, 4, 7, 9, 10, 11, 13, and 14; Segawa syndrome, autosomal recessive; Deafness, autosomal dominant 3a, 4, 12, 13, 15, autosomal dominant nonsyndromic sensorineural 17, 20, and 65; Congenital dyserythropoietic anemia, type I and II; Enhanced s-cone syndrome; Adult neuronal ceroid lipofuscinosis; Atrial fibrillation, familial, 11, 12, 13, and 16; Norum disease; Osteosarcoma; Partial albinism; Biotinidase deficiency; Combined cellular and humoral immune defects with granulomas; Alpers encephalopathy; Holocarboxylase synthetase deficiency; Maturity-onset diabetes of the young, type 1, type 2, type 11, type 3, and type 9; Variegate porphyria; Infantile cortical hyperostosis; Testosterone 17-beta-dehydrogenase deficiency; L-2-hydroxyglutaric aciduria; Tyrosinase-negative oculocutaneous albinism; Primary ciliary dyskinesia 24; Pontocerebellar hypoplasia type 4; Ciliary dyskinesia, primary, 7, 11, 15, 20 and 22; Idiopathic basal ganglia calcification 5; Brain atrophy; Craniosynostosis 1 and 4; Keratoconus 1; Rasopathy; Congenital adrenal hyperplasia and Congenital adrenal hypoplasia, X-linked; Mitochondrial DNA depletion syndrome 11, 12 (cardiomyopathic type), 2, 4B (MNGIE type), 8B (MNGIE type); Brachydactyly with hypertension; Cornea plana 2; Aarskog syndrome; Multiple epiphyseal dysplasia 5 or Dominant; Corneal endothelial dystrophy type 2; Aminoacylase 1 deficiency; Delayed speech and language development; Nicolaides-Baraitser syndrome; Enterokinase deficiency; Ectrodactyly, ectodermal dysplasia, and cleft lip/palate syndrome 3; Arthrogryposis multiplex congenita, distal, X-linked; Perrault syndrome 4; Jervell and Lange-Nielsen syndrome 2; Hereditary Nonpolyposis Colorectal Neoplasms; Robinow syndrome, autosomal recessive, autosomal recessive, with brachy-syn-polydactyly; Neurofibrosarcoma; Cytochrome-c oxidase deficiency; Vesicoureteral reflux 8; Dopamine beta hydroxylase deficiency; Carbohydrate-deficient glycoprotein syndrome type I and II; Progressive familial intrahepatic cholestasis 3; Benign familial neonatal-infantile seizures; Pancreatitis, chronic, susceptibility to; Rhizomelic chondrodysplasia punctata type 2 and type 3; Disordered steroidogenesis due to cytochrome p450 oxidoreductase deficiency; Deafness with labyrinthine aplasia microtia and microdontia (FAMM); Rothmund-Thomson syndrome; Cortical dysplasia, complex, with other brain malformations 5 and 6; Myasthenia, familial infantile, 1; Trichorhinophalangeal dysplasia type I; Worth disease; Splenic hypoplasia; Molybdenum cofactor deficiency, complementation group A; Sebastian syndrome; Progressive familial intrahepatic cholestasis 2 and 3; Weill-Marchesani syndrome 1 and 3; Microcephalic osteodysplastic primordial dwarfism type 2; Surfactant metabolism dysfunction, pulmonary, 2 and 3; Severe X-linked myotubular myopathy; Pancreatic cancer 3; Platelet-type bleeding disorder 15 and 8; Tyrosinase-positive oculocutaneous albinism; Borrone Di Rocco Crovato syndrome; ATR-X syndrome; Sucrase-isomaltase deficiency; Complement component 4, partial deficiency of, due to dysfunctional cl inhibitor; Congenital central hypoventilation; Infantile hypophosphatasia; Plasminogen activator inhibitor type 1 deficiency; Malignant lymphoma, non-Hodgkin; Hyperornithinemia-hyperammonemia-homocitrullinuria syndrome; Schwartz Jampel syndrome type 1; Fetal hemoglobin quantitative trait locus 1; Myopathy, distal, with anterior tibial onset; Noonan syndrome 1 and 4, LEOPARD syndrome 1; Glaucoma 1, open angle, e, F, and G; Kenny-Caffey syndrome type 2; PTEN hamartoma tumor syndrome; Duchenne muscular dystrophy; Insulin-resistant diabetes mellitus and acanthosis nigricans; Microphthalmia, isolated 3, 5, 6, 8, and with coloboma 6; Raine syndrome; Premature ovarian failure 4, 5, 7, and 9; Allan-Hemdon-Dudley syndrome; Citrullinemia type I; Alzheimer disease, familial, 3, with spastic paraparesis and apraxia; Familial hemiplegic migraine types 1 and 2; Ventriculomegaly with cystic kidney disease; Pseudoxanthoma elasticum; Homocysteinemia due to MTHFR deficiency, CBS deficiency, and Homocystinuria, pyridoxine-responsive; Dilated cardiomyopathy 1A, 1AA, IC, IG, IBB, 1DD, IFF, 1HH, II, IKK, IN, IS, 1Y, and 3B; Muscle AMP guanine oxidase deficiency; Familial cancer of breast; Hereditary sideroblastic anemia; Myoglobinuria, acute recurrent, autosomal recessive; Neuroferritinopathy; Cardiac arrhythmia; Glucose transporter type 1 deficiency syndrome; Holoprosencephaly sequence; Angiopathy, hereditary, with nephropathy, aneurysms, and muscle cramps; Isovaleryl-CoA dehydrogenase deficiency; Kallmann syndrome 1, 2, and 6; Permanent neonatal diabetes mellitus; Acrocallosal syndrome, Schinzel type; Gordon syndrome; MYH9 related disorders; Donnai Barrow syndrome; Severe congenital neutropenia and 6, autosomal recessive; Charcot-Marie-Tooth disease, types ID and IVF; Coffin-Lowry syndrome; mitochondrial 3-hydroxy-3-methylglutaryl-CoA synthase deficiency; Hypomagnesemia, seizures, and mental retardation; Ischiopatellar dysplasia; Multiple congenital anomalies—hypotonia—seizures syndrome 3; Spastic paraplegia 50, autosomal recessive; Short stature with nonspecific skeletal abnormalities; Severe myoclonic epilepsy in infancy; Propionic academia; Adolescent nephronophthisis; Macrocephaly, macrosomia, facial dysmorphism syndrome; Stargardt disease 4; Ehlers-Danlos syndrome type 7 (autosomal recessive), classic type, type 2 (progeroid), hydroxylysine-deficient, type 4, type 4 variant, and due to tenascin-X deficiency; Myopia 6; Coxa plana; Familial cold autoinflammatory syndrome 2; Malformation of the heart and great vessels; von Willebrand disease type 2M and type 3; Deficiency of galactokinase; Brugada syndrome 1; X-linked ichthyosis with steryl-sulfatase deficiency; Congenital ocular coloboma; Histiocytosis-lymphadenopathy plus syndrome; Aniridia, cerebellar ataxia, and mental retardation; Left ventricular noncompaction 3; Amyotrophic lateral sclerosis types 1, 6, 15 (with or without frontotemporal dementia), 22 (with or without frontotemporal dementia), and 10; Osteogenesis imperfecta type 12, type 5, type 7, type 8, type I, type III, with normal sclerae, dominant form, recessive perinatal lethal; Hematologic neoplasm; Favism, susceptibility to; Pulmonary Fibrosis And/Or Bone Marrow Failure, Telomere-Related, 1 and 3; Dominant hereditary optic atrophy; Dominant dystrophic epidermolysis bullosa with absence of skin; Muscular dystrophy, congenital, megaconial type; Multiple gastrointestinal atresias; McCune-Albright syndrome; Nail-patella syndrome; McLeod neuroacanthocytosis syndrome; Common variable immunodeficiency 9; Partial hypoxanthine-guanine phosphoribosyltransferase deficiency; Pseudohypoaldosteronism type 1 autosomal dominant and recessive and type 2; Urocanate hydratase deficiency; Heterotopia; Meckel syndrome type 7; Ch\xc3\xa9diak-Higashi syndrome, Chediak-Higashi syndrome, adult type; Severe combined immunodeficiency due to ADA deficiency, with microcephaly, growth retardation, and sensitivity to ionizing radiation, atypical, autosomal recessive, T cell-negative, B cell-positive, NK cell-negative of NK-positive; Insulin resistance; Deficiency of steroid 11-beta-monooxygenase; Popliteal pterygium syndrome; Pulmonary arterial hypertension related to hereditary hemorrhagic telangiectasia; Deafness, autosomal recessive 1A, 2, 3, 6, 8, 9, 12, 15, 16, 18b, 22, 28, 31, 44, 49, 63, 77, 86, and 89; Primary hyperoxaluria, type I, type, and type III; Paramyotonia congenita of von Eulenburg; Desbuquois syndrome; Carnitine palmitoyltransferase I, II, II (late onset), and II (infantile) deficiency; Secondary hypothyroidism; Mandibulofacial dysostosis, Treacher Collins type, autosomal recessive; Cowden syndrome 1; Li-Fraumeni syndrome 1; Asparagine synthetase deficiency; Malattia leventinese; Optic atrophy 9; Infantile convulsions and paroxysmal choreoathetosis, familial; Ataxia with vitamin E deficiency; Islet cell hyperplasia; Miyoshi muscular dystrophy 1; Thrombophilia, hereditary, due to protein C deficiency, autosomal dominant and recessive; Fechtner syndrome; Properdin deficiency, X-linked; Mental retardation, stereotypic movements, epilepsy, and/or cerebral malformations; Creatine deficiency, X-linked; Pilomatrixoma; Cyanosis, transient neonatal and atypical nephropathic; Adult onset ataxia with oculomotor apraxia; Hemangioma, capillary infantile; PC-K6a; Generalized dominant dystrophic epidermolysis bullosa; Pelizaeus-Merzbacher disease; Myopathy, centronuclear, 1, congenital, with excess of muscle spindles, distal, 1, lactic acidosis, and sideroblastic anemia 1, mitochondrial progressive with congenital cataract, hearing loss, and developmental delay, and tubular aggregate, 2; Benign familial neonatal seizures 1 and 2; Primary pulmonary hypertension; Lymphedema, primary, with myelodysplasia; Congenital long QT syndrome; Familial exudative vitreoretinopathy, X-linked; Autosomal dominant hypohidrotic ectodermal dysplasia; Primordial dwarfism; Familial pulmonary capillary hemangiomatosis; Carnitine acylcamitine translocase deficiency; Visceral myopathy; Familial Mediterranean fever and Familial mediterranean fever, autosomal dominant; Combined partial and complete 17-alpha-hydroxylase/17, 20-lyase deficiency; Oto-palato-digital syndrome, type I; Nephrolithiasis/osteoporosis, hypophosphatemic, 2; Familial type 1 and 3 hyperlipoproteinemia; Phenotypes; CHARGE association; Fuhrmann syndrome; Hypotrichosis-lymphedema-telangiectasia syndrome; Chondrodysplasia Blomstrand type; Acroerythrokeratoderma; Slowed nerve conduction velocity, autosomal dominant; Hereditary cancer-predisposing syndrome; Craniodiaphyseal dysplasia, autosomal dominant; Spinocerebellar ataxia autosomal recessive 1 and 16; Proprotein convertase 1/3 deficiency; D-2-hydroxyglutaric aciduria 2; Hyperekplexia 2 and Hyperekplexia hereditary; Central core disease; Opitz G/BBB syndrome; Cystic fibrosis; Thiel-Behnke corneal dystrophy; Deficiency of bisphosphoglycerate mutase; Mitochondrial short-chain Enoyl-CoA Hydratase 1 deficiency; Ectodermal dysplasia skin fragility syndrome; Wolfram-like syndrome, autosomal dominant; Microcytic anemia; Pyruvate carboxylase deficiency; Leukocyte adhesion deficiency type I and III; Multiple endocrine neoplasia, types land 4; Transient bullous dermolysis of the newborn; Primrose syndrome; Non-small cell lung cancer; Congenital muscular dystrophy; Lipase deficiency combined; COLE-CARPENTER SYNDROME 2; Atrioventricular septal defect and common atrioventricular junction; Deficiency of xanthine oxidase; Waardenburg syndrome type 1, 4C, and 2E (with neurologic involvement); Stickler syndrome, types 1 (nonsyndromic ocular) and 4; Corneal fragility keratoglobus, blue sclerae and joint hypermobility; Microspherophakia; Chudley-McCullough syndrome; Epidermolysa bullosa simplex and limb girdle muscular dystrophy, simplex with mottled pigmentation, simplex with pyloric atresia, simplex, autosomal recessive, and with pyloric atresia; Rett disorder; Abnormality of neuronal migration; Growth hormone deficiency with pituitary anomalies; Leigh disease; Keratosis palmoplantaris striata 1; Weissenbacher-Zweymuller syndrome; Medium-chain acyl-coenzyme A dehydrogenase deficiency; UDPglucose-4-epimerase deficiency; susceptibility to Autism, X-linked 3; Rhegmatogenous retinal detachment, autosomal dominant; Familial febrile seizures 8; Ulna and fibula absence of with severe limb deficiency; Left ventricular noncompaction 6; Centromeric instability of chromosomes 1, 9 and 16 and immunodeficiency; Hereditary diffuse leukoencephalopathy with spheroids; Cushing syndrome; Dopamine receptor d2, reduced brain density of; C-like syndrome; Renal dysplasia, retinal pigmentary dystrophy, cerebellar ataxia and skeletal dysplasia; Ovarian dysgenesis 1; Pierson syndrome; Polyneuropathy, hearing loss, ataxia, retinitis pigmentosa, and cataract; Progressive intrahepatic cholestasis; autosomal dominant, autosomal recessive, and X-linked recessive Alport syndromes; Angelman syndrome; Amish infantile epilepsy syndrome; Autoimmune lymphoproliferative syndrome, type 1a; Hydrocephalus; Marfanoid habitus; Bare lymphocyte syndrome type 2, complementation group E; Recessive dystrophic epidermolysis bullosa; Factor H, VII, X, v and factor viii, combined deficiency of 2, xiii, a subunit, deficiency; Zonular pulverulent cataract 3; Warts, hypogammaglobulinemia, infections, and myelokathexis; Benign hereditary chorea; Deficiency of hyaluronoglucosaminidase; Microcephaly, hiatal hernia and nephrotic syndrome; Growth and mental retardation, mandibulofacial dysostosis, microcephaly, and cleft palate; Lymphedema, hereditary, id; Delayed puberty; Apparent mineralocorticoid excess; Generalized arterial calcification of infancy 2; METHYLMALONIC ACIDURIA, mut(0) TYPE; Congenital heart disease, multiple types, 2; Familial hypoplastic, glomerulocystic kidney; Cerebrooculofacioskeletal syndrome 2; Stargardt disease 1; Mental retardation, autosomal recessive 15, 44, 46, and 5; Prolidase deficiency; Methylmalonic aciduria cblB type; Oguchi disease; Endocrine-cerebroosteodysplasia; Lissencephaly 1, 2 (X-linked), 3, 6 (with microcephaly), X-linked; Somatotroph adenoma; Gamstorp-Wohlfart syndrome; Lipid proteinosis; Inclusion body myopathy 2 and 3; Enlarged vestibular aqueduct syndrome; Osteoporosis with pseudoglioma; Acquired long QT syandrome; Phenylketonuria; CHOPS syndrome; Global developmental delay; Bietti crystalline corneoretinal dystrophy; Noonan syndrome-like disorder with or without juvenile myelomonocytic leukemia; Congenital erythropoietic porphyria; Atrophiabulborum hereditaria; Paragangliomas 3; Van der Woude syndrome; Aromatase deficiency; Birk Barel mental retardation dysmorphism syndrome; Amyotrophic lateral sclerosis type 5; Methemoglobinemia types I 1 and 2; Congenital stationary night blindness, type 1A, IB, 1C, IE, IF, and 2A; Seizures; Thyroid cancer, follicular; Lethal congenital contracture syndrome 6; Distal hereditary motor neuronopathy type 2B; Sex cord-stromal tumor; Epileptic encephalopathy, childhood-onset, early infantile, 1, 19, 23, 25, 30, and 32; Myofibrillar myopathy 1 and ZASP-related; Cerebellar ataxia infantile with progressive external ophthalmoplegia; Purine-nucleoside phosphorylase deficiency; Forebrain defects; Epileptic encephalopathy Lennox-Gastaut type; Obesity; 4, Left ventricular noncompaction 10; Verheij syndrome; Mowat-Wilson syndrome; Odontotrichomelic syndrome; Patterned dystrophy of retinal pigment epithelium; Lig4 syndrome; Barakat syndrome; IRAK4 deficiency; Somatotroph adenoma; Branched-chain ketoacid dehydrogenase kinase deficiency; Cystinuria; Familial aplasia of the vermis; Succinyl-CoA acetoacetate transferase deficiency; Scapuloperoneal spinal muscular atrophy; Pigmentary retinal dystrophy; Glanzmann thrombasthenia; Primary open angle glaucoma juvenile onset 1; Aicardi Goutieres syndromes 1, 4, and 5; Renal dysplasia; Intrauterine growth retardation, metaphyseal dysplasia, adrenal hypoplasia congenita, and genital anomalies; Beaded hair; Short stature, onychodysplasia, facial dysmorphism, and hypotrichosis; Metachromatic leukodystrophy; Cholestanol storage disease; Three M syndrome 2; Leber congenital amaurosis 11, 12, 13, 16, 4, 7, and 9; Mandibuloacral dysplasia with type A or B lipodystrophy, atypical; Meier-Gorlin syndromes land 4; Hypotrichosis 8 and 12; Short QT syndrome 3; Ectodermal dysplasia 1 ib; Anonychia; Pseudohypoparathyroidism type 1A, Pseudopseudohypoparathyroidism; Leber optic atrophy; Bainbridge-Ropers syndrome; Weaver syndrome; Short stature, auditory canal atresia, mandibular hypoplasia, skeletal abnormalities; Deficiency of alpha-mannosidase; Macular dystrophy, vitelliform, adult-onset; Glutaric aciduria, type 1; Gangliosidosis GM1 typel (with cardiac involvement) 3; Mandibuloacral dysostosis; Hereditary lymphedema type I; Atrial standstill 2; Kabuki make-up syndrome; Bethlem myopathy and Bethlem myopathy 2; Myeloperoxidase deficiency; Fleck corneal dystrophy; Hereditary acrodermatitis enteropathica; Hypobetalipoproteinemia, familial, associated with apob32; Cockayne syndrome type A; Hyperparathyroidism, neonatal severe; Ataxia-telangiectasia-like disorder; Pendred syndrome; I blood group system; Familial benign pemphigus; Visceral heterotaxy 5, autosomal; Nephrogenic diabetes insipidus, Nephrogenic diabetes insipidus, X-linked; Minicore myopathy with external ophthalmoplegia; Perry syndrome; hypohidrotic/hair/tooth type, autosomal recessive; Hereditary pancreatitis; Mental retardation and microcephaly with pontine and cerebellar hypoplasia; Glycogen storage disease 0 (muscle), II (adult form), IXa2, IXc, type 1A; Osteopathia striata with cranial sclerosis; Gluthathione synthetase deficiency; Brugada syndrome and Brugada syndrome 4; Endometrial carcinoma; Hypohidrotic ectodermal dysplasia with immune deficiency; Cholestasis, intrahepatic, of pregnancy 3; Bemard-Soulier syndrome, types A1 and A2 (autosomal dominant); Salla disease; Ornithine aminotransferase deficiency; PTEN hamartoma tumor syndrome; Distichiasis-lymphedema syndrome; Corticosteroid-binding globulin deficiency; Adult neuronal ceroid lipofuscinosis; Dejerine-Sottas disease; Tetraamelia, autosomal recessive; Senior-Loken syndrome 4 and 5; Glutaric acidemia IIA and IIB; Aortic aneurysm, familial thoracic 4, 6, and 9; Hyperphosphatasia with mental retardation syndrome 2, 3, and 4; Dyskeratosis congenita X-linked; Arthrogryposis, renal dysfunction, and cholestasis 2; Bannayan-Riley-Ruvalcaba syndrome; 3-Methylglutaconic aciduria; Isolated 17,20-lyase deficiency; Gorlin syndrome; Hand foot uterus syndrome; Tay-Sachs disease, B1 variant, Gm2-gangliosidosis (adult), Gm2-gangliosidosis (adult-onset); Dowling-degos disease 4; Parkinson disease 14, 15, 19 (juvenile-onset), 2, 20 (early-onset), 6, (autosomal recessive early-onset, and 9; Ataxia, sensory, autosomal dominant; Congenital microvillous atrophy; Myoclonic-Atonic Epilepsy; Tangier disease; 2-methyl-3-hydroxybutyric aciduria; Familial renal hypouricemia; Schizencephaly; Mitochondrial DNA depletion syndrome 4B, MNGIE type; Feingold syndrome 1; Renal carnitine transport defect; Familial hypercholesterolemia; Townes-Brocks-branchiootorenal-like syndrome; Griscelli syndrome type 3; Meckel-Gruber syndrome; Bullous ichthyosiform erythroderma; Neutrophil immunodeficiency syndrome; Myasthenic Syndrome, Congenital, 17, 2A (slow-channel), 4B (fast-channel), and without tubular aggregates; Microvascular complications of diabetes 7; McKusick Kaufman syndrome; Chronic granulomatous disease, autosomal recessive cytochrome b-positive, types 1 and 2; Arginino succinate lyase deficiency; Mitochondrial phosphate carrier and pyruvate carrier deficiency; Lattice corneal dystrophy Type III; Ectodermal dysplasia-syndactyly syndrome 1; Hypomyelinating leukodystrophy 7; Mental retardation, autosomal dominant 12, 13, 15, 24, 3, 30, 4, 5, 6, and 9; Generalized epilepsy with febrile seizures plus, types 1 and 2; Psoriasis susceptibility 2; Frank Ter Haar syndrome; Thoracic aortic aneurysms and aortic dissections; Crouzon syndrome; Granulosa cell tumor of the ovary; Epidermolytic palmoplantar keratoderma; Leri Weill dyschondrosteosis; 3 beta-Hydroxysteroid dehydrogenase deficiency; Familial restrictive cardiomyopathy 1; Autosomal dominant progressive external ophthalmoplegia with mitochondrial DNA deletions 1 and 3; Antley-Bixler syndrome with genital anomalies and disordered steroidogenesis; Hajdu-Cheney syndrome; Pigmented nodular adrenocortical disease, primary, 1; Episodic pain syndrome, familial, 3; Dejerine-Sottas syndrome, autosomal dominant; FG syndrome and FG syndrome 4; Dendritic cell, monocyte, B lymphocyte, and natural killer lymphocyte deficiency; Hypothyroidism, congenital, nongoitrous, 1; Miller syndrome; Nemaline myopathy 3 and 9; Oligodontia-colorectal cancer syndrome; Cold-induced sweating syndrome 1; Van Buchem disease type 2; Glaucoma 3, primary congenital, d; Citrullinemia type I and II; Nonaka myopathy; Congenital muscular dystrophy due to partial LAMA2 deficiency; Myoneural gastrointestinal encephalopathy syndrome; Leigh syndrome due to mitochondrial complex I deficiency; Medulloblastoma; Pyruvate dehydrogenase E1-alpha deficiency; Carcinoma of colon; Nance-Horan syndrome; Sandhoff disease, adult and infantil types; Arthrogryposis renal dysfunction cholestasis syndrome; Autosomal recessive hypophosphatemic bone disease; Doyne honeycomb retinal dystrophy; Spinocerebellar ataxia 14, 21, 35, 40, and 6; Lewy body dementia; RRM2B-related mitochondrial disease; Brody myopathy; Megalencephaly-polymicrogyria-polydactyly-hydrocephalus syndrome 2; Usher syndrome, types 1, IB, ID, 1G, 2A, 2C, and 2D; hypocalcification type and hypomaturation type, IIA1 Amelogenesis imperfecta; Pituitary hormone deficiency, combined 1, 2, 3, and 4; Cushing symphalangism; Renal tubular acidosis, distal, autosomal recessive, with late-onset sensorineural hearing loss, or with hemolytic anemia; Infantile nephronophthisis; Juvenile polyposis syndrome; Sensory ataxic neuropathy, dysarthria, and ophthalmoparesis; Deficiency of 3-hydroxyacyl-CoA dehydrogenase; Parathyroid carcinoma; X-linked agammaglobulinemia; Megaloblastic anemia, thiamine-responsive, with diabetes mellitus and sensorineural deafness; Multiple sulfatase deficiency; Neurodegeneration with brain iron accumulation 4 and 6; Cholesterol monooxygenase (side-chain cleaving) deficiency; hemolytic anemia due to Adenylosuccinate lyase deficiency; Myoclonus with epilepsy with ragged red fibers; Pitt-Hopkins syndrome; Multiple pterygium syndrome Escobar type; Homocystinuria-Megaloblastic anemia due to defect in cobalamin metabolism, cblE complementation type; Cholecystitis; Spherocytosis types 4 and 5; Multiple congenital anomalies; Xeroderma pigmentosum, complementation group b, group D, group E, and group G; Leiner disease; Groenouw corneal dystrophy type 1; Coenzyme Q10 deficiency, primary 1, 4, and 7; Distal spinal muscular atrophy, congenital nonprogressive; Warburg micro syndrome 2 and 4; Bile acid synthesis defect, congenital, 3; Acth-independent macronodular adrenal hyperplasia 2; Acrocapitofemoral dysplasia; Paget disease of bone, familial; Severe neonatal-onset encephalopathy with microcephaly; Zimmermann-Laband syndrome and Zimmermann-Laband syndrome 2; Reifenstein syndrome; Familial hypokalemia-hypomagnesemia; Photosensitive trichothiodystrophy; Adult junctional epidermolysis bullosa; Lung cancer; Freeman-Sheldon syndrome; Hyperinsulinism-hyperammonemia syndrome; Posterior polar cataract type 2; Sclerocornea, autosomal recessive; Juvenile GM>1<gangliosidosis; Cohen syndrome; Hereditary Paraganglioma-Pheochromocytoma Syndromes; Neonatal insulin-dependent diabetes mellitus; Hypochondrogenesis; Floating-Harbor syndrome; Cutis laxa with osteodystrophy and with severe pulmonary, gastrointestinal, and urinary abnormalities; Congenital contractures of the limbs and face, hypotonia, and developmental delay; Dyskeratosis congenita autosomal dominant and autosomal dominant, 3; Histiocytic medullary reticulosis; Costello syndrome; Immunodeficiency 15, 16, 19, 30, 31C, 38, 40, 8, due to defect in cd3-zeta, with hyper IgM type 1 and 2, and X-Linked, with magnesium defect, Epstein-Barr vims infection, and neoplasia; Atrial septal defects 2, 4, and 7 (with or without atrioventricular conduction defects); GTP cyclohydrolase I deficiency; Talipes equinovarus; Phosphoglycerate kinase 1 deficiency; Tuberous sclerosis 1 and 2; Autosomal recessive congenital ichthyosis 1, 2, 3, 4A, and 4B; and Familial hypertrophic cardiomyopathy 1, 2, 3, 4, 7, 10, 23 and 24.

### Indications by Tissue

[0874] Additional suitable diseases and disorders that can be treated by the systems and methods provided herein include, without limitation, diseases of the central nervous system (CNS) (see exemplary diseases and affected genes in Table 13), diseases of the eye (see exemplary diseases and affected genes in Table 14), diseases of the heart (see exemplary diseases and affected genes in Table 15), diseases of the hematopoietic stem cells (HSC) (see exemplary diseases and affected genes in Table 16), diseases of the kidney (see exemplary diseases and affected genes in Table 17), diseases of the liver (see exemplary diseases and affected genes in Table 18), diseases of the lung (see exemplary diseases and affected genes in Table 19), diseases of the skeletal muscle (see exemplary diseases and affected genes in Table 20), and diseases of the skin (see exemplary diseases and affected genes in Table 21). Table 22 provides exemplary protective mutations that reduce risks of the indicated diseases. In some embodiments, a gene modifying system described herein is used to treat an indication of any of Tables 13-21. In some embodiments, the GeneWriter system modifies a target site in genomic DNA in a cell, wherein the target site is in a gene of any of Tables 13-21, e.g., in a subject having the corresponding indication listed in any of Tables 13-21. In some embodiments, the gene modifying systems corrects a mutation in the gene. In some embodiments, the gene modifying system inserts a sequence that had been deleted from the gene (e.g., through a disease-causing mutation). In some embodiments, the gene modifying system deletes a sequence that had been duplicated in the gene (e.g., through a disease-causing mutation). In some embodiments, the gene modifying system replaces a mutation (e.g., a disease-causing mutation) with the corresponding wild-type sequence. In some embodiments, the mutation is a substitution, insertion, deletion, or inversion.

TABLE 13
CNS diseases and genes affected.

| | Gene |
|---|---|
| Disease | Affected |
| Alpha-mannosidosis | MAN2B1 |
| Ataxia-telangiectasia | ATM |
| CADASIL | NOTCH3 |
| Canavan disease | ASPA |
| Carbamoyl-phosphate synthetase 1 deficiency | CPS1 |
| CLN1 disease | PPT1 |
| CLN2 Disease | TPP1 |
| CLN3 Disease (Juvenile neuronal ceroid | CLN3 |
| lipofuscinosis, Batten Disease) | |
| Coffin-Lowry syndrome | RPS6KA3 |
| Congenital myasthenic syndrome 5 | COLQ |
| Cornelia de Lange syndrome (NIPBL) | NIPBL |
| Cornelia de Lange syndrome (SMC1A) | SMC1A |
| Dravet syndrome (SCN1A) | SCN1A |
| Glycine encephalopathy (GLDC) | GLDC |
| GM1 gangliosidosis | GLB1 |
| Huntington's Disease | HTT |
| Hydrocephalus with stenosis of the aqueduct of | L1CAM |
| Sylvius | |
| Leigh Syndrome | SURF1 |
| Metachromatic leukodystrophy (ARSA) | ARSA |
| MPS type 2 | IDS |
| MPS type 3 | Type 3a: |
| | SGSH |
| | Type 3b: |
| | NAGLU |
| Mucolipidosis IV | MCOLN1 |
| Neurofibromatosis Type 1 | NF1 |
| Neurofibromatosis type 2 | NF2 |
| Pantothenate kinase-associated neurodegeneration | PANK2 |
| Pyridoxine-dependent epilepsy | ALDH7A1 |
| Rett syndrome (MECP2) | MECP2 |
| Sandhoff disease | HEXB |
| Semantic dementia (Frontotemporal dementia) | MAPT |
| Spinocerebellar ataxia with axonal neuropathy | SETX |
| (Ataxia with Oculomotor Apraxia) | |
| Tay-Sachs disease | HEXA |
| X-linked Adrenoleukodystrophy | ABCD1 |

TABLE 14
Eye diseases and genes affected.

| Disease | Gene Affected |
|---|---|
| Achromatopsia | CNGB3 |
| Amaurosis Congenita (LCA1) | GUCY2D |
| Amaurosis Congenita (LCA10) | CEP290 |
| Amaurosis Congenita (LCA2) | RPE65 |
| Amaurosis Congenita (LCA8) | CRB1 |
| Choroideremia | CHM |
| Cone Rod Dystrophy (ABCA4) | ABCA4 |
| Cone Rod Dystrophy (CRX) | CRX |
| Cone Rod Dystrophy (GUCY2D) | GUCY2D |
| Cystinosis, Ocular Nonnephropathic | CTNS |
| Lattice corneal dystrophy type I | TGFBI |
| Macular Corneal Dystrophy (MCD) | CHST6 |
| Optic Atrophy | OPA1 |
| Retinitis Pigmentosa (AR) | USH2A |
| Retinitis Rigmentosa (AD) | RHO |
| Stargardt Disease | ABCA4 |
| Vitelliform Macular Dystrophy | BEST1; PRPH2 |

TABLE 15
Heart diseases and genes affected.

| | Gene |
|---|---|
| Disease | Affected |
| Arrhythmogenic right ventricular cardiomyopathy (ARVC) | PKP2 |
| Barth syndrome | TAZ |
| Becker muscular dystrophy | DMD |
| Brugada syndrome | SCN5A |
| Catecholaminergic polymorphic ventricular tachycardia | RYR2 |
| (RYR2) | |
| Dilated cardiomyopathy (LMNA) | LMNA |
| Dilated cardiomyopathy (TTN) | TTN |
| Duchenne muscular dystrophy | DMD |
| Emery-Dreifuss Muscular Dystrophy Type I | EMD |
| Familial hypertrophic cardiomyopathy | MYH7 |
| Familial hypertrophic cardiomyopathy | MYBPC3 |
| Jervell Lange-Nielsen syndrome | KCNQ1 |
| LCHAD deficiency | HADHA |
| Limb-girdle muscular dystrophy type 1B (Emery-Dreifuss | LMNA |
| EDMD2) | |
| Limb-girdle muscular dystrophy, type 2D | SGCA |
| Long QT syndrome 1 (Romano Ward) | KCNQ1 |

TABLE 16
HSC diseases and genes affected.

| Disease | Gene Affected |
|---|---|
| ADA-SCID | ADA |
| Adrenoleukodystrophy (CALD) | ABCD1 |
| Alpha-mannosidosis | MAN2B1 |
| Chronic granulomatous disease | CYBB; CYBA; NCF1; |
| | NCF2; NCF4 |
| Common variable immunodeficiency | TNFRSF13B |
| Fanconi anemia | FANCA; FANCC; FANCG |
| Gaucher disease | GBA |
| Globoid cell leukodystrophy (Krabbe | GALC |
| disease) | |
| Hemophagocytic lymphohistiocytosis | PRF1; STX11; STXBP2; |
| | UNC13D |
| IL-7R SCID | IL7R |
| JAK-3 SCID | JAK3 |
| Malignant infantile osteopetrosis- | TCIRG1; Many genes |
| autosomal recessive osteopetrosis | implicated |
| Metachromatic leukodystrophy | ARSA; PSAP |
| MPS 1S (Scheie syndrome) | IDUA |
| MPS2 | IDS |
| MPS7 | GUSB |
| Mucolipidosis II | GNPTAB |
| Niemann-Pick disease A and B | SMPD1 |
| Niemann-Pick disease C | NPC1 |
| Paroxysmal Nocturnal Hemoglobinuria | PIGA |
| Pompe disease | GAA |
| Pyruvate kinase deficiency (PKD) | PKLR |
| RAG 1/2 Deficiency (SCID with | RAG1/RAG2 |
| granulomas) | |
| Severe Congenital Neutropenia | ELANE; HAX1 |
| Sickle cell disease (SCD) | HBB |
| Tay Sachs | HEXA |
| Thalassemia | HBB |
| Wiskott-Aldrich Syndrome | WAS |
| X-linked agammaglobulinemia | BTK |
| X-linked SCID | IL2RG |

TABLE 17
Kidney diseases and genes affected.

| | Gene |
|---|---|
| Disease | Affected |
| Alport syndrome | COL4A5 |
| Autosomal dominant polycystic kidney disease (PKD1) | PKD1 |
| Autosomal dominant polycystic kidney disease (PKD2) | PDK2 |
| Autosomal dominant tubulointerstitial kidney disease | MUC1 |
| (MUC1) | |
| Autosomal dominant tubulointerstitial kidney disease | UMOD |
| (UMOD) | |
| Autosomal recessive polycystic kidney disease | PKHD1 |
| Congenital nephrotic syndrome | NPHS2 |
| Cystinosis | CTNS |

TABLE 18
Liver diseases and genes affected.

| Disease | Gene Affected |
|---|---|
| Acute intermittent porphyria | HMBS |
| Alagille syndrome | JAG1 |
| Alpha-1-antitrypsin deficiency | SERPINA1 |
| Carbamoyl phosphate synthetase I | CPS1 |
| deficiency | |
| Citrullinemia I | ASS1 |
| Crigler-Najjar | UGT1A1 |
| Fabry | LPL |
| Familial chylomicronemia syndrome | GLA |
| Gaucher | GBE1 |
| GSD IV | GBA |
| Heme A | F8 |
| Heme B | F9 |
| Hereditary amyloidosis (hTTR) | TTR |
| Hereditary angioedema | SERPING1 (KLKB1 |
| | for CRISPR) |
| HoFH | LDLRAP1 |
| Hypercholesterolemia | PCSK9 |
| Methylmalonic acidemia | MMUT |
| MPS II | IDS |
| MPS III | Type IIIa: SGSH |
| | Type IIIb: NAGLU |
| | Type IIIc: HGSNAT |
| | Type IIId: GNS |
| MPS IV | Type IVA: GALNS |
| | Type IVB: GLB1 |
| MPS VI | ARSB |
| MSUD | Type Ia: BCKDHA |
| | Type Ib: BCKDHB |
| | Type II: DBT |
| OTC Deficiency | OTC |
| Polycystic Liver Disease | PRKCSH |
| Pompe | GAA |
| Primary Hyperoxaluria 1 | AGXT (HAO1 or LDHA |
| | for CRISPR) |
| Progressive familial intrahepatic | ATP8B1 |
| cholestasis type 1 | |
| Progressive familial intrahepatic | ABCB11 |
| cholestasis type 2 | |
| Progressive familial intrahepatic | ABCB4 |
| cholestasis type 3 | |
| Propionic acidemia | PCCB; PCCA |
| Wilson's Disease | ATP7B |
| Glycogen storage disease, Type 1a | G6PC |
| Glycogen storage disease, Type IIIb | AGL |
| Isovaleric acidemia | IVD |
| Wolman disease | LIPA |

TABLE 19
Lung diseases and genes affected.

| Disease | Gene Affected |
|---|---|
| Alpha-1 antitrypsin deficiency | SERPINA1 |
| Cystic fibrosis | CFTR |
| Primary ciliary dyskinesia | DNAI1 |
| Primary ciliary dyskinesia | DNAH5 |
| Primary pulmonary hypertension I | BMPR2 |
| Surfactant Protein B (SP-B) Deficiency (pulmonary | SFTPB |
| surfactant metabolism dysfunction 1) | |

TABLE 20
Skeletal muscle diseases and genes affected.

| Disease | Gene Affected |
|---|---|
| Becker muscular dystrophy | DMD |
| Becker myotonia | CLCN1 |
| Bethlem myopathy | COL6A2 |
| Centronuclear myopathy, X-linked | MTM1 |
| (myotubular) | |
| Congenital myasthenic syndrome | CHRNE |
| Duchenne muscular dystrophy | DMD |
| Emery-Dreifuss muscular dystrophy, AD | LMNA |
| Facioscapulohumeral Muscular Dystrophy | DUX4 - D4Z4 |
| | chromosomal region |
| Hyperkalemic periodic paralysis | SCN4A |
| Hypokalemic periodic paralysis | CACNA1S |
| Limb-girdle muscular dystrophy 2A | CAPN3 |
| Limb-girdle muscular dystrophy 2B | DYSF |
| Limb-girdle muscular dystrophy, type 2D | SGCA |
| Miyoshi muscular dystrophy 1 | DYSF |
| Paramyotonia congenita | SCN4A |
| Thomsen myotonia | CLCN1 |
| VCP myopathy (IBMPFD) 1 | VCP |

TABLE 21
Skin diseases and genes affected.

| Disease | Gene Affected |
|---|---|
| Epidermolysis Bullosa Dystrophica Dominant | COL7A1 |
| Epidermolysis Bullosa Dystrophica Recessive | COL7A1 |
| (Hallopeau-Siemens) | |
| Epidermolysis Bullosa Junctional | LAMB3 |
| Epidermolysis Bullosa Simplex | KRT5; KRT14 |
| Epidermolytic Ichthyosis | KRT1; KRT10 |
| Hailey-Hailey Disease | ATP2C1 |
| Lamellar Ichthyosis/Nonbullous Congenital | TGM1 |
| Ichthyosiform Erythroderma (ARCI) | |
| Netherton Syndrome | SPINK5 |

TABLE 22
Exemplary protective mutations that reduce disease risk.

| Disease | Gene | Exemplary Protective Mutation |
|---|---|---|
| Alzheimer's | APP | A673T |
| Parkinson's | SGK1 | |
| Diabetes (Type II) | SLC30A8 | p.Arg138X; p.Lys34SerfsX50 |
| Cardiovascular | PCSK9 | R46L |
| Disease | | |
| Cardiovascular | ASGR1 | NM_001671.4, c.284 − 36_283 + 33delCTGGGGCTGGGG; |
| Disease | | (SEQ ID NO: 15433) NP_001662.1, p.W158X |
| Cardiovascular | NPC1L1 | p.Arg406X |
| Disease | | |
| Cardiovascular | APOC3 | R19X; IVS2 + 1G→A; A43T |
| Disease | | |
| Cardiovascular | LPA | |
| Disease | | |
| Cardiovascular | ANGPTL4 | E40K |
| Disease | | |
| Cardiovascular | ANGPTL3 | p.Ser17Ter; p.Asn121fs; p.Asn147fs; c.495 + 6T→C |
| Disease | | |
| HIV infection | CCR5 | CCR5-delta32 |

### Pathogenic Mutations

[0875] In some embodiments, the systems or methods provided herein can be used to correct a pathogenic mutation. The pathogenic mutation can be a genetic mutation that increases an individual's susceptibility or predisposition to a certain disease or disorder. In some embodiments, the pathogenic mutation is a disease-causing mutation in a gene associated with a disease or disorder. In some embodiments, the systems or methods provided herein can be used to revert the pathogenic mutation to its wild-type counterpart. In some embodiments, the systems or methods provided herein can be used to change the pathogenic mutation to a sequence not causing the disease or disorder.

Table 23 provides exemplary indications (column 1), underlying genes (column 2), and pathogenic mutations that can be corrected using the systems or methods described herein (column 3).

TABLE 23
Indications, genes, and causitive pathogenic mutations.

| Disease | Gene | Pathogenic Mutation^{#} |
|---|---|---|
| Achromatopsia | CNGB3 | 1148delC |
| Alpha-1 Antitrypsin Deficiency | SERPINAI | E342K |
| Alpha-1 Antitrypsin Deficiency | SERPINAI | E342K |
| Alpha-1 Antitrypsin Deficiency | SERPINAI | R48C (R79C) |
| Amaurosis Congenita (LCA10) | CEP290 | 2991 + 1655A > G |
| Andersen- Tawil syndrome | KCNJ2 | R218W |
| Arrhythmogenic right ventricular | PKP2 | c.235C > T |
| cardiomyopathy (ARVC) | | |
| associated with congenital factor XI deficiency | F11 | E117* |
| associated with congenital factor XI deficiency | F11 | F283L |
| ATTR amyloidosis | TTR | V50M/N30M |
| autosomal dominant deafness | COCH | G88E |
| autosomal dominant deafness | TECTA | Y1870C |
| autosomal dominant Parkinson's disease | SNCA | A53T |
| autosomal dominant Parkinson's disease | SNCA | A30P |
| Autosomal dominant rickets | FGF23 | R176Q |
| autosomal recessive deafness | CX30 | T5M |
| autosomal recessive deafness | DFNB59 | R183W |
| autosomal recessive deafness | TMC1 | Y182C |
| autosomal recessive hypercholesterolemia | ARH | Q136* |
| Blackfan-Diamond anemia | RPS19 | R62Q |
| blue-cone monochromatism | OPN1LW | C203R |
| Brugada syndrome | SCN5A | E1784K |
| CADASIL syndrome | NOTCH3 gene | R90C |
| CADASIL syndrome | NOTCH3 gene | R141C |
| Canavan disease | ASPA | E285A |
| Canavan disease | ASPA | Y231X |
| Canavan disease | ASPA | A305E |
| carnitine palmitoyltransferase II deficiency | CPT2 | S113L |
| choroideremia | CHM | R293* |
| choroideremia | CHM | R270* |
| choroideremia | CHM | A117A |
| Citrullinemia Type I | ASS | G390R |
| classic galactosemia | GALT | Q188R |
| classic homocysteinuria | CBS | T191M |
| classic homocysteinuria | CBS | G307S |
| CLN2 Disease | TPP1 | c.509 − 1 G > C |
| CLN2 Disease | TPP1 | c.622 C > T |
| CLN2 Disease | TPP1 | c.851 G > T |
| cone-rod dystrophy | GUCY2D | R838C |
| congenital factor V deficiency | F5 | R506Q |
| congenital factor V deficiency | F5 | R534Q |
| congenital factor VII deficiency | F7 | A294V |
| congenital factor VII deficiency | F7 | C310F |
| congenital factor VII deficiency | F7 | R304Q |
| congenital factor VII deficiency | F7 | QI00R |
| Creutzfeldt- Jakob disease (CJD) | PRNP | E200K |
| Creutzfeldt- Jakob disease (CJD) | PRNP | M129V |
| Creutzfeldt- Jakob disease (CJD) | PRNP | P102L |
| Creutzfeldt- Jakob disease (CJD) | PRNP | D178N |
| cystic fibrosis | CFTR | G551D |
| cystic fibrosis | CFTR | W1282* |
| cystic fibrosis | CFTR | R553* |
| cystic fibrosis | CFTR | R117H |
| cystic fibrosis | CFTR | delta F508 |
| cystinosis | CTNS | W138* |
| Darier disease | ATP2A2 | N767S |
| Darier disease | ATP2A2 | N767S |
| Darier disease | ATP2A2 | N767S |
| Epidermolysis Bullosa Junctional | LAMB3 | R42X |
| Epidermolysis Bullosa Junctional | LAMB3 | R635X |
| familial amyotrophic lateral sclerosis (ALS) | SOD1 | A4V |
| familial amyotrophic lateral sclerosis (ALS) | SOD1 | H46R |
| familial amyotrophic lateral sclerosis (ALS) | SOD1 | G37R |
| Gaucher disease | GBA | N370S |
| Gaucher disease | GBA | N370S |
| Gaucher disease | GBA | L444P |
| Gaucher disease | GBA | L444P |
| Gaucher disease | GBA | L483P |
| glutaryl-CoA dehydrogenase deficiency | GCDH | R138G |
| glutaryl-CoA dehydrogenase deficiency | GCDH | M263V |
| glutaryl-CoA dehydrogenase deficiency | GCDH | R402W |
| glycine encephalopathy | GLDC | A389V |
| glycine encephalopathy | GLDC | G771R |
| glycine encephalopathy | GLDC | T269M |
| hemophilia A | F8 | R2178C |
| hemophilia A | F8 | R550C |
| hemophilia A | F8 | R2169H |
| hemophilia A | F8 | R1985Q |
| hemophilia B | F9 | T342M |
| hemophilia B | F9 | R294Q |
| hemophilia B | F9 | R43Q |
| hemophilia B | F9 | R191H |
| hemophilia B | F9 | G106S |
| hemophilia B | F9 | A279T |
| hemophilia B | F9 | R75* |
| hemophilia B | F9 | R294* |
| hemophilia B | F9 | R379Q |
| Hereditary antithrombin deficiency type I | SERPINCI | R48C (R79C) |
| hereditary chronic pancreatitis | PRSS1 | R122H |
| Hunter syndrome | IDS | R88C |
| Hunter syndrome | IDS | G374G |
| Hurler syndrome (MPS1) | IDUA | Q70* |
| Hurler syndrome (MPS1) | IDUA | W402* |
| Hyperkalemic periodic paralysis | SCN4A | T704M |
| Hyperkalemic periodic paralysis | SCN4A | M1592V |
| Hyperkalemic periodic paralysis | CACNA1S | p.Arg528X |
| Hyperkalemic periodic paralysis | CACNA1S | p.Arg1239 |
| intermittent porphyria | HMBS | R173W |
| isolated agammaglobulinemia | E47 | E555K |
| Lattice corneal dystrophy type I | TGFBI | Arg124Cys |
| LCHAD deficiency | HADHA | Glu474Gln |
| Leber congenital amaurosis 2 | RPE65 | R44* |
| Leber congenital amaurosis 2 | RPE65 | IVS1 |
| Leber congenital amaurosis 2 | RPE65 | G − A, +5 |
| Lesch-Nyhan syndrome | HPRTI | R51* |
| Lesch-Nyhan syndrome | HPRTI | R170* |
| Limb-girdle muscular dystrophy, type 2D | SGCA | Arg77Cys |
| Marteauz- Lamy Syndrome (MSPVI) | ARSB | Y210C |
| Mediterranean G6PD deficiency | G6PD | S188D |
| medium-chain acyl-CoA dehydrogenase | ACADM | K329E |
| deficiency | | |
| medium-chain acyl-CoA dehydrogenase | ACADM | K329E |
| deficiency | | |
| medium-chain acyl-CoA dehydrogenase | ACADM | K329E |
| deficiency | | |
| Meesmann epithelial corneal dystrophy | KRT12 | L132P |
| metachromatic leukodystrophy | ARSA | P426L |
| metachromatic leukodystrophy | ARSA | c.459 + 1G > A |
| Morquio Syndrome (MPSIVA) | GALNS | R386C |
| Mucolipidosis IV | MCOLN1 | 406 − 2A > G |
| Mucolipidosis IV | MCOLN1 | 511 6943del |
| Neimann-Pick disease type A | SMPDI | L302P |
| Neuronal ceroid lipofuscinosis (NCL) | CLN2 | R208* |
| neuronal ceroid lipofuscinosis 1 | PPT1 | R151* |
| Parkinson's disease | LRRK2 | G2019S |
| Pendred syndrome | PDS | T461P |
| Pendred syndrome | PDS | L236P |
| Pendred syndrome | PDS | c.1001 + 1G > A |
| Pendred syndrome | PDS | IVS8, +1 G > A, |
| phenylketonuria | PAH | R408W |
| phenylketonuria | PAH | I65T |
| phenylketonuria | PAH | R261Q |
| phenylketonuria | PAH | IVS10 − 11G > A |
| phenylketonuria | PCDH15 | R245* |
| phenylketonuria | PCDH15 | R245* |
| Pompe disease | GAA | c.−32 − 13T > G |
| Primary ciliary dyskinesia | DNAI1 | IVS1 + 2_3insT |
| Primary ciliary dyskinesia | DNAH5 | 10815delT |
| primary hypoxaluria | AGXT | G170R |
| Progressive familial intrahepatic cholestasis type | ABCB11 | D482G (c.1445A > G) |
| 2 | | |
| Progressive familial intrahepatic cholestasis type | ABCB11 | E297G |
| 2 | | |
| Propionic acidemia | PCCB; PCCA | c.1218_1231del14ins12 |
| pseudoxanthoma elasticum | ABCC6 | R1141* |
| Pyruvate kinase deficiency (PKD) | PKLR | c.1456c −> T |
| retinitis pigmentos | USH2a | C759F |
| retinitis pigmentosa | IMPDHI | D226N |
| retinitis pigmentosa | PDE6A | V685M |
| retinitis pigmentosa | PDE6A | D670G |
| retinitis pigmentosa | PRPF3 | T494M |
| retinitis pigmentosa | PRPF8 | H2309R |
| retinitis pigmentosa | RHO | P23H |
| retinitis pigmentosa | RHO | P347L |
| retinitis pigmentosa | RHO | P347L |
| retinitis pigmentosa | RHO | D190N |
| retinitis pigmentosa | RPI | R667* |
| retinitis pigmentosa/Usher syndrome type 1C | USH1C | V72V |
| Rett syndrome | MECP2 | R106W |
| Rett syndrome | MECP2 | R133C |
| Rett syndrome | MECP2 | R306C |
| Rett syndrome | MECP2 | R168* |
| Rett syndrome | MECP2 | R255* |
| Sanfilippo syndrome A (MPSIIIA) | SGSH | R74C |
| Sanfilippo syndrome A (MPSIIIA) | SGSH | R245H |
| Sanfilippo syndrome B (MPSIIIB) | NAGLU | R297* |
| Sanfilippo syndrome B (MPSIIIB) | NAGLU | Y140C |
| severe combined immunodeficiency | ADA | G216R |
| severe combined immunodeficiency | ADA | G216R |
| severe combined immunodeficiency | ADA | Q3* |
| sickle cell disease | HBB | E6V |
| sickle cell disease | HBB | E6V |
| sickle cell disease | HBB | E6V |
| sickle cell disease | HBB | E26K |
| sickle cell disease | HBB | E26K |
| sickle cell disease | HBB | E7K |
| sickle cell disease | HBB | c.−138C > T |
| sickle cell disease | HBB | IVS2 |
| sickle cell disease | HBB | 654 C > T |
| Sly Syndrome (MPSVII) | GUSB | L175F |
| Stargardt disease | ABCA4 | A1038V |
| Stargardt disease | ABCA4 | A1038V |
| Stargardt disease | ABCA4 | L541P |
| Stargardt disease | ABCA4 | G1961E |
| Stargardt disease | ABCA4 | G1961E |
| Stargardt disease | ABCA4 | G1961E |
| Stargardt disease | ABCA4 | G1961E |
| Stargardt disease | ABCA4 | c.2588G > C |
| Stargardt disease | ABCA4 | c.5461 − 10 T > C |
| Stargardt disease | ABCA4 | c.5714 + 5G > A |
| Tay Sachs | HEXA | InsTATC1278 |
| tyrosinemia type 1 | FAH | P261L |
| Usher syndrome type 1F | PCDH15 | R245* |
| variegate porphyria | PPOX | R59W |
| VCP myopathy (IBMPFD) 1 | VCP | R1555X |
| von Gierke disease | G6PC | Q347* |
| von Gierke disease | G6PC | Q347* |
| von Gierke disease | G6PC | Q347* |
| von Gierke disease | G6PC | R83C |
| Wilson's Disease | ATP7B | E297G |
| X-linked myotubular myopathy | MTMI | c.1261 − 10A > G |
| X-linked retinoschisis | RS1 | R102W |
| X-linked retinoschisis | RS1 | R141C |

^{#}See J T den Dunnen and S E Antonarakis, Hum Mutat. 2000; 15(1): 7-12, herein incorporated by reference in its entirety, for details of the nomenclatures of gene mutations.
*means a stop codon.

### Compensatory Edits

[0876] In some embodiments, the systems or methods provided herein can be used to introduce a compensatory edit. In some embodiments, the compensatory edit is at a position of a gene associated with a disease or disorder, which is different from the position of a disease-causing mutation. In some embodiments, the compensatory mutation is not in the gene containing the causitive mutation. In some embodiments, the compensatory edit can negate or compensate for a disease-causing mutation. In some embodiments, the compensatory edit can be introduced by the systems or methods provided herein to suppress or reverse the mutant effect of a disease-causing mutation.

[0877] Table 24 provides exemplary indications (column 1), genes (column 2), and compensatory edits that can be introduced using the systems or methods described herein (column 3). In some embodiments, the compensatory edits provided in Table 24 can be introduced to suppress or reverse the mutant effect of a disease-causing mutation.

TABLE 24
Indications, genes, compensatory edits,
and exemplary design features.

| Disease | Gene | Nucleotide Change^{#} |
|---|---|---|
| Alpha-1 Antitrypsin Deficiency | SERPINAI | F51L |
| Alpha-1 Antitrypsin Deficiency | SERPINAI | M374I |
| Alpha-1 Antitrypsin Deficiency | SERPINAI | A348V/A347V |
| Alpha-1 Antitrypsin Deficiency | SERPINAI | K387R |
| Alpha-1 Antitrypsin Deficiency | SERPINAI | T59A |
| Alpha-1 Antitrypsin Deficiency | SERPINAI | T68A |
| ATTR amyloidosis | TTR | Al08V |
| ATTR amyloidosis | TTR | Rl04H |
| ATTR amyloidosis | TTR | T119M |
| Cystic fibrosis | CFTR | R555K |
| Cystic fibrosis | CFTR | F409L |
| Cystic fibrosis | CFTR | F433L |
| Cystic fibrosis | CFTR | H667R |
| Cystic fibrosis | CFTR | Rl070W |
| Cystic fibrosis | CFTR | R29K |
| Cystic fibrosis | CFTR | R553Q |
| Cystic fibrosis | CFTR | 1539T |
| Cystic fibrosis | CFTR | G550E |
| Cystic fibrosis | CFTR | F429S |
| Cystic fibrosis | CFTR | Q637R |
| Sickle cell disease | HBB | A70T |
| Sickle cell disease | HBB | A70V |
| Sickle cell disease | HBB | L88P |
| Sickle cell disease | HBB | F85L and/or F85P |
| Sickle cell disease | HBB | E22G |
| Sickle cell disease | HBB | G16D and/or G16N |

^{#}See J T den Dunnen and S E Antonarakis, Hum Mutat. 2000; 15(1): 7-12, herein incorporated by reference in its entirety, for details of the nomenclatures of gene mutations.

### Regulatory Edits

[0878] In some embodiments, the systems or methods provided herein can be used to introduce a regulatory edit. In some embodiments, the regulatory edit is introduced to a regulatory sequence of a gene, for example, a gene promoter, gene enhancer, gene repressor, or a sequence that regulates gene splicing. In some embodiments, the regulatory edit increases or decreases the expression level of a target gene. In some embodiments, the target gene is the same as the gene containing a disease-causing mutation. In some embodiment, the target gene is different from the gene containing a disease-causing mutation. For example, the systems or methods provided herein can be used to upregulate the expression of fetal hemoglobin by introducing a regulatory edit at the promoter of bcl11a, thereby treating sickle cell disease.

[0879] Table 25 provides exemplary indications (column 1), genes (column 2), and regulatory edits that can be introduced using the systems or methods described herein (column 3).

TABLE 25
Indications, genes, and compensatory regulatory edits.

| Disease | Gene | Nucleotide Change^{#} |
|---|---|---|
| homozygous familial | LDLR | c.81C > T |
| hypercholesterolaemia | | |
| Porphyrias | ALAS1 | c.3G > A |
| Porphyrias | ALAS1 | c.2T > C |
| Porphyrias | ALAS1 | c.46C > T |
| Porphyrias | ALAS1 | c.91C > T |
| Porphyrias | ALAS1 | c.91C > T |
| Porphyrias | ALAS1 | c.226C > T |
| Porphyrias | ALAS1 | c.226C > T |
| Porphyrias | ALAS1 | c.226C > T |
| Porphyrias | ALAS1 | c.229C > T |
| Porphyrias | ALAS1 | c.247C > T |
| Porphyrias | ALAS1 | c.247C > T |
| Porphyrias | ALAS1 | c.250C > T |
| Porphyrias | ALAS1 | c.250C > T |
| Porphyrias | ALAS1 | c.340C > T |
| Porphyrias | ALAS1 | c.340C > T |
| Porphyrias | ALAS1 | c.349C > T |
| Porphyrias | ALAS1 | c.391C > T |
| Porphyrias | ALAS1 | c.391C > T |
| Porphyrias | ALAS1 | c.403C > T |
| Porphyrias | ALAS1 | c.403C > T |
| Porphyrias | ALAS1 | c.199 + 1G > A |
| Porphyrias | ALAS1 | c.199 + 1G > A |
| Porphyrias | ALAS1 | c.199 + 1G > A |
| Porphyrias | ALAS1 | c.199 + 1G > A |
| Porphyrias | ALAS1 | c.199 + 2T > C |
| Porphyrias | ALAS1 | c.199 + 2T > C |
| Porphyrias | ALAS1 | c.199 + 2T > C |
| Porphyrias | ALAS1 | c.199 + 2T > C |
| Porphyrias | ALAS1 | c.200 − 2A > G |
| Porphyrias | ALAS1 | c.427 + 1G > A |
| Porphyrias | ALAS1 | c.427 + 2T > C |
| Porphyrias | ALAS1 | c.1165 + 1G > A |
| Porphyrias | ALAS1 | c.1 165 + 2T > C |
| Porphyrias | ALAS1 | c.1166 − 1A > G |
| Porphyrias | ALAS1 | c.133 1 − 2A > G |
| sickle cell disease | BCL11A | c.386 − 24278G > A |
| sickle cell disease | BCL11A | c.386 − 24983T > C |
| sickle cell disease | HBG1 | c.−167C > T |
| sickle cell disease | HBG1 | c.−170G > A |
| sickle cell disease | HBG1 | c.−249C > T |
| sickle cell disease | HBG2 | c.−211C > T |
| sickle cell disease | HBG2 | c.−228T > C |
| sickle cell disease | HBG1/2 | C. −198 T > C |
| sickle cell disease | HBG1/2 | C. −198 T > C |
| sickle cell disease | HBG1/2 | C. −198 T > C |
| sickle cell disease | HBG1/2 | C. −198 T > C |
| sickle cell disease | HBG1/2 | C. −198 T > C |
| sickle cell disease | HBG1/2 | C. −198 T > C |
| sickle cell disease | HBG1/2 | C. −198 T > C |
| sickle cell disease | HBG1/2 | C. −175 T > C |
| sickle cell disease | HBG1/2 | C. −175 T > C |
| sickle cell disease | HBG1/2 | C. −175 T > C |
| sickle cell disease | HBG1/2 | C. −175 T > C |
| sickle cell disease | HBG1/2 | C. −175 T > C |
| sickle cell disease | HBG1/2 | C. −114~−102 deletion |
| sickle cell disease | HBG1/2 | C. −114~−102 deletion |
| sickle cell disease | HBG1/2 | C. −114~−102 deletion |
| sickle cell disease | HBG1/2 | C. −114~−102 deletion |
| sickle cell disease | HBG1/2 | C. −114~−102 deletion |
| sickle cell disease | HBG1/2 | C. −114~−102 deletion |
| sickle cell disease | HBG1/2 | C. −114~−102 deletion |
| sickle cell disease | HBG1/2 | C. −114~−102 deletion |
| sickle cell disease | HBG1/2 | C. −114~−102 deletion |
| sickle cell disease | HBG1/2 | C. −114~−102 deletion |
| sickle cell disease | HBG1/2 | C. −114~−102 deletion |
| sickle cell disease | HBG1/2 | c. −90 BCLllA Binding |
| sickle cell disease | HBG1/2 | c. −90 BCLllA Binding |
| sickle cell disease | HBG1/2 | C. −202 C > T, −201 |
| | | C > T, −198 T > C, −197 |
| | | C > T, −196 C > T, −195 |
| | | C > G |
| sickle cell disease | HBG1/2 | C. −197 C > T, −196 |
| | | C > T, −195 C > G |

^{#}See J T den Dunnen and S E Antonarakis, Hum Mutat. 2000; 15(1): 7-12, herein incorporated by reference in its entirety, for details of the nomenclatures of gene mutations.

### Repeat Expansion Diseases

[0880] In some embodiments, the systems or methods provided herein can be used to a repeat expansion disease, for example, a repeat expansion disease provided in Table 26. Table 26 provides the indication (column 1), the gene (column 2), minimal repeat sequence of the repeat that is expanded in the condition (column 3), and the location of the repeat relative to the listed gene for each indication (column 4). In some embodiments, the systems, or methods provided herein, for example, those comprising gene modifying polypeptides, can be used to treat repeat expansion diseases by resetting the number of repeats at the locus according to a customized RNA template.

TABLE 26
Exemplary repeat expansion diseases, genes, causal repeats, and repeat locations.

| Disease | Gene | Causal repeat | Repeat location |
|---|---|---|---|
| myotonic dystrophy 1 | DMPK/DM1 | CTG | 3′ UTR |
| myotonic dystrophy 2 | ZNF9/CNBP | CCTG | Intron 1 |
| dentatorubral-pallidoluysian atrophy | ATN1 | CAG | Coding |
| fragile X mental retardation | FMR1 | CGG | 5′ UTR |
| syndrome | | | |
| fragile X E mental retardation | FMR2 | GCC | 5′ UTR |
| Friedreich′s ataxia | FXN | GAA | Intron |
| fragile X tremor ataxia syndrome | FMR1 | CGG | 5′ UTR |
| Huntington′s disease | HTT | CAG | Coding |
| Huntington′s disease-like 2 | JPH3 | CTG | 3′ UTR, coding |
| myoclonic epilepsy of Unverricht | CSTB | CCCCGCCCCGCG | Promoter |
| and Lundborg | | (SEQ ID NO: | |
| | | 15434) | |
| oculopharyngeal muscular dystrophy | PABPN1 | GCG | Coding |
| spinal and bulbar muscular atrophy | AR | CAG | Coding |
| spinocerebellar ataxia 1 | ATXN1 | CAG | Coding |
| spinocerebellar ataxia 2 | ATXN2 | CAG | Coding |
| spinocerebellar ataxia 3 | ATXN3 | CAG | Coding |
| spinocerebellar ataxia 6 | CACNA1A | CAG | Coding |
| spinocerebellar ataxia 7 | ATXN7 | CAG | Coding |
| spinocerebellar ataxia 8 | ATXN8 | CTG/CAG | CTG/CAG |
| | | | (ATXN8) |
| spinocerebellar ataxia 10 | ATXN10 | ATTCT | Intron |
| spinocerebellar ataxia 12 | PPP2R2B | CAG | Promoter, 5′ |
| | | | UTR? |
| spinocerebellar ataxia 17 | TBP | CAG | Coding |
| Syndromic/non-syndromic X-linked | ARX | GCG | Coding |
| mental retardation | | | |

### Exemplary Heterologous Object Sequences

[0881] In some embodiments, the systems or methods provided herein comprise a heterologous object sequence, wherein the heterologous object sequence or a reverse complementary sequence thereof, encodes a protein (e.g., an antibody) or peptide. In some embodiments, the therapy is one approved by a regulatory agency such as FDA.

[0882] In some embodiments, the protein or peptide is a protein or peptide from the THPdb database (Usmani et al. PLoS One 12(7):e0181748 (2017), herein incorporated by reference in its entirety. In some embodiments, the protein or peptide is a protein or peptide disclosed in Table 28. In some embodiments, the systems, or methods disclosed herein, for example, those comprising gene modifying polypeptides, may be used to integrate an expression cassette for a protein or peptide from Table 28 into a host cell to enable the expression of the protein or peptide in the host. In some embodiments, the sequences of the protein or peptide in the first column of Table 28 can be found in the patents or applications provided in the third column of Table 28, incorporated by reference in their entireties.

[0883] In some embodiments, the protein or peptide is an antibody disclosed in Table 1 of Lu et al. J Biomed Sci 27(1):1 (2020), herein incorporated by reference in its entirety. In some embodiments, the protein or peptide is an antibody disclosed in Table 29. In some embodiments, the systems, or methods disclosed herein, for example, those comprising gene modifying polypeptides, may be used to integrate an expression cassette for an antibody from Table 29 into a host cell to enable the expression of the antibody in the host. In some embodiments, a system or method described herein is used to express an agent that binds a target of column 2 of Table 29 (e.g., a monoclonal antibody of column 1 of Table 29) in a subject having an indication of column 3 of Table 29.

TABLE 28
Exemplary protein and peptide therapeutics.

| Therapeutic peptide | Category | Patent Number |
|---|---|---|
| Lepirudin | Antithrombins and Fibrinolytic | CA1339104 |
| | Agents | |
| Cetuximab | Antineoplastic Agents | CA1340417 |
| Dor se alpha | Enzymes | CA2184581 |
| Denileukin diftitox | Antineoplastic Agents | |
| Etanercept | Immunosuppressive Agents | CA2476934 |
| Bivalirudin | Antithrombins | U.S. Pat. No. 7,582,727 |
| Leuprolide | Antineoplastic Agents | |
| Peginterferon alpha-2a | Immunosuppressive Agents | CA2203480 |
| Alteplase | Thrombolytic Agents | |
| Interferon alpha-n1 | Antiviral Agents | |
| Darbepoetin alpha | Anti-anemic Agents | CA2165694 |
| Reteplase | Fibrinolytic Agents | CA2107476 |
| Epoetin alpha | Hematinics | CA1339047 |
| Salmon Calcitonin | Bone Density Conservation | U.S. Pat. No. 6,440,392 |
| | Agents | |
| Interferon alpha-n3 | Immunosuppressive Agents | |
| Pegfilgrastim | Immunosuppressive Agents | CA1341537 |
| Sargramostim | Immunosuppressive Agents | CA1341150 |
| Secretin | Diagnostic Agents | |
| Peginterferon alpha-2b | Immunosuppressive Agents | CA1341567 |
| Asparagi se | Antineoplastic Agents | |
| Thyrotropin alpha | Diagnostic Agents | U.S. Pat. No. 5,840,566 |
| Antihemophilic Factor | Coagulants and Thrombotic agents | CA2124690 |
| A kinra | Antirheumatic Agents | CA2141953 |
| Gramicidin D | Anti-Bacterial Agents | |
| Intravenous | Immunologic Factors | |
| Immunoglobulin | | |
| Anistreplase | Fibrinolytic Agents | |
| Insulin Regular | Antidiabetic Agents | |
| Tenecteplase | Fibrinolytic Agents | CA2129660 |
| Menotropins | Fertility Agents | |
| Interferon gamma-1b | Immunosuppressive Agents | U.S. Pat. No. 6,936,695 |
| Interferon alpha-2a, | | CA2172664 |
| Recombi nt | | |
| Coagulation factor VIIa | Coagulants | |
| Oprelvekin | Antineoplastic Agents | |
| Palifermin | Anti-Mucositis Agents | |
| Glucagon recombi nt | Hypoglycemic Agents | |
| Aldesleukin | Antineoplastic Agents | |
| Botulinum Toxin Type B | Antidystonic Agents | |
| Omalizumab | Anti-Allergic Agents | CA2113813 |
| Lutropin alpha | Fertility Agents | U.S. Pat. No. 5,767,251 |
| Insulin Lispro | Hypoglycemic Agents | U.S. Pat. No. 5,474,978 |
| Insulin Glargine | Hypoglycemic Agents | U.S. Pat. No. 7,476,652 |
| Collage se | | |
| Rasburicase | Gout Suppressants | CA2175971 |
| Adalimumab | Antirheumatic Agents | CA2243459 |
| Imiglucerase | Enzyme Replacement Agents | U.S. Pat. No. 5,549,892 |
| Abciximab | Anticoagulants | CA1341357 |
| Alpha-1-protei se inhibitor | Serine Protei se Inhibitors | |
| Pegaspargase | Antineoplastic Agents | |
| Interferon beta-1a | Antineoplastic Agents | CA1341604 |
| Pegademase bovine | Enzyme Replacement Agents | |
| Human Serum Albumin | Serum substitutes | U.S. Pat. No. 6,723,303 |
| Eptifibatide | Platelet Aggregation Inhibitors | U.S. Pat. No. 6,706,681 |
| Serum albumin iodo ted | Diagnostic Agents | |
| Infliximab | Antirheumatic Agents, Anti- | CA2106299 |
| | Inflammatory Agents, Non- | |
| | Steroidal, Dermatologic Agents, | |
| | Gastrointesti 1 Agents and | |
| | Immunosuppressive Agents | |
| Follitropin beta | Fertility Agents | U.S. Pat. No. 7,741,268 |
| Vasopressin | Antidiuretic Agents | |
| Interferon beta-1b | Adjuvants, Immunologic and | CA1340861 |
| | Immunosuppressive Agents | |
| Interferon alphacon-1 | Antiviral Agents and | CA1341567 |
| | Immunosuppressive Agents | |
| Hyaluronidase | Adjuvants, Anesthesia and | |
| | Permeabilizing Agents | |
| Insulin, porcine | Hypoglycemic Agents | |
| Trastuzumab | Antineoplastic Agents | CA2103059 |
| Rituximab | Antineoplastic Agents, | CA2149329 |
| | Immunologic Factors and | |
| | Antirheumatic Agents | |
| Basiliximab | Immunosuppressive Agents | CA2038279 |
| Muromo b | Immunologic Factors and | |
| | Immunosuppressive Agents | |
| Digoxin Immune Fab | Antidotes | |
| (Ovine) | | |
| Ibritumomab | | CA2149329 |
| Daptomycin | | U.S. Pat. No. 6,468,967 |
| Tositumomab | | |
| Pegvisomant | Hormone Replacement Agents | U.S. Pat. No. 5,849,535 |
| Botulinum Toxin Type A | Neuromuscular Blocking Agents, | CA2280565 |
| | Anti-Wrinkle Agents and | |
| | Antidystonic Agents | |
| Pancrelipase | Gastrointesti 1 Agents and Enzyme | |
| | Replacement Agents | |
| Streptoki se | Fibrinolytic Agents and | |
| | Thrombolytic Agents | |
| Alemtuzumab | | CA1339198 |
| Alglucerase | Enzyme Replacement Agents | |
| Capromab | Indicators, Reagents and | |
| | Diagnostic Agents | |
| Laronidase | Enzyme Replacement Agents | |
| Urofollitropin | Fertility Agents | U.S. Pat. No. 5,767,067 |
| Efalizumab | Immunosuppressive Agents | |
| Serum albumin | Serum substitutes | U.S. Pat. No. 6,723,303 |
| Choriogo dotropin alpha | Fertility Agents and Go dotropins | U.S. Pat. No. 6,706,681 |
| Antithymocyte globulin | Immunologic Factors and | |
| | Immunosuppressive Agents | |
| Filgrastim | Immunosuppressive Agents, | CA1341537 |
| | Antineutropenic Agents and | |
| | Hematopoietic Agents | |
| Coagulation factor ix | Coagulants and Thrombotic | |
| | Agents | |
| Becaplermin | Angiogenesis Inducing Agents | CA1340846 |
| Agalsidase beta | Enzyme Replacement Agents | CA2265464 |
| Interferon alpha-2b | Immunosuppressive Agents | CA1341567 |
| Oxytocin | Oxytocics, Anti-tocolytic Agents | |
| | and Labor Induction Agents | |
| Enfuvirtide | HIV Fusion Inhibitors | U.S. Pat. No. 6,475,491 |
| Palivizumab | Antiviral Agents | CA2197684 |
| Daclizumab | Immunosuppressive Agents | |
| Bevacizumab | Angiogenesis Inhibitors | CA2286330 |
| Arcitumomab | Diagnostic Agents | U.S. Pat. No. 8,420,081 |
| Arcitumomab | Diagnostic Agents | U.S. Pat. No. 7,790,142 |
| Eculizumab | | CA2189015 |
| Panitumumab | | |
| Ranibizumab | Ophthalmics | CA2286330 |
| Idursulfase | Enzyme Replacement Agents | |
| Alglucosidase alpha | Enzyme Replacement Agents | CA2416492 |
| Exe tide | Hypoglycemic Agents | U.S. Pat. No. 6,872,700 |
| Mecasermin | | U.S. Pat. No. 5,681,814 |
| Pramlintide | | U.S. Pat. No. 5,686,411 |
| Galsulfase | Enzyme Replacement Agents | |
| Abatacept | Antirheumatic Agents and | CA2110518 |
| | Immunosuppressive Agents | |
| Cosyntropin | Hormones and Diagnostic Agents | |
| Corticotropin | | |
| Insulin aspart | Hypoglycemic Agents and | U.S. Pat. No. 5,866,538 |
| | Antidiabetic Agents | |
| Insulin detemir | Antidiabetic Agents | U.S. Pat. No. 5,750,497 |
| Insulin glulisine | Antidiabetic Agents | U.S. Pat. No. 6,960,561 |
| Pegaptanib | Intended for the prevention of | |
| | respiratory distress syndrome | |
| | (RDS) in premature infants at high | |
| | risk for RDS. | |
| Nesiritide | | |
| Thymalphasin | | |
| Defibrotide | Antithrombins | |
| tural alpha interferon OR | | |
| multiferon | | |
| Glatiramer acetate | | |
| Preotact | | |
| Teicoplanin | Anti-Bacterial Agents | |
| Ca kinumab | Anti-Inflammatory Agents and | |
| | Monoclo 1 antibodies | |
| Ipilimumab | Antineoplastic Agents and | CA2381770 |
| | Monoclo 1 antibodies | |
| Sulodexide | Antithrombins and Fibrinolytic | |
| | Agents and Hypoglycemic Agents | |
| | and Anticoagulants and | |
| | Hypolipidemic Agents | |
| Tocilizumab | | CA2201781 |
| Teriparatide | Bone Density Conservation | U.S. Pat. No. 6,977,077 |
| | Agents | |
| Pertuzumab | Monoclo 1 antibodies | CA2376596 |
| Rilo cept | Immunosuppressive Agents | U.S. Pat. No. 5,844,099 |
| Denosumab | Bone Density Conservation | CA2257247 |
| | Agents and Monoclo 1 antibodies | |
| Liraglutide | | U.S. Pat. No. 6,268,343 |
| Golimumab | Antipsoriatic Agents and Monoclo | |
| | 1 antibodies and TNF inhibitor | |
| Belatacept | Antirheumatic Agents and | |
| | Immunosuppressive Agents | |
| Buserelin | | |
| Velaglucerase alpha | Enzymes | U.S. Pat. No. 7,138,262 |
| Tesamorelin | | U.S. Pat. No. 5,861,379 |
| Brentuximab vedotin | | |
| Taliglucerase alpha | Enzymes | |
| Belimumab | Monoclo 1 antibodies | |
| Aflibercept | Antineoplastic Agents and | U.S. Pat. No. 7,306,799 |
| | Ophthalmics | |
| Asparagi se erwinia | Enzymes | |
| chrysanthemi | | |
| Ocriplasmin | Ophthalmics | |
| Glucarpidase | Enzymes | |
| Teduglutide | | U.S. Pat. No. 5,789,379 |
| Raxibacumab | Anti-Infective Agents and | |
| | Monoclo 1 antibodies | |
| Certolizumab pegol | TNF inhibitor | CA2380298 |
| Insulin, isophane | Hypoglycemic Agents and | |
| | Antidiabetic Agents | |
| Epoetin zeta | | |
| Obinutuzumab | Antineoplastic Agents | |
| Fibrinolysin aka plasmin | | U.S. Pat. No. 3,234,106 |
| Follitropin alpha | | |
| Romiplostim | Colony-Stimulating Factors and | |
| | Thrombopoietic Agents | |
| Luci ctant | Pulmo ry surfactants | U.S. Pat. No. 5,407,914 |
| talizumab | Immunosuppressive agents | |
| Aliskiren | Renin inhibitor | |
| Ragweed Pollen Extract | | |
| Secukinumab | Inhibitor | US20130202610 |
| Somatotropin Recombi nt | Hormone Replacement Agents | CA1326439 |
| Drotrecogin alpha | Antisepsis | CA2036894 |
| Alefacept | Dermatologic and | |
| | Immunosupressive agents | |
| OspA lipoprotein | Vaccines | |
| Uroki se | | U.S. Pat. No. 4,258,030 |
| Abarelix | Anti-Testosterone Agents | U.S. Pat. No. 5,968,895 |
| Sermorelin | Hormone Replacement Agents | |
| Aprotinin | | U.S. Pat. No. 5,198,534 |
| Gemtuzumab ozogamicin | Antineoplastic agents and | U.S. Pat. No. 5,585,089 |
| | Immunotoxins | |
| Satumomab Pendetide | Diagnostic Agents | |
| Albiglutide | Drugs used in diabetes; alimentary | |
| | tract and metabolism; blood | |
| | glucose lowering drugs, excl. | |
| | insulins. | |
| Alirocumab | | |
| Ancestim | | |
| Antithrombin alpha | | |
| Antithrombin III human | | |
| Asfotase alpha | Enzymes Alimentary Tract and | |
| | Metabolism | |
| Atezolizumab | | |
| Autologous cultured | | |
| chondrocytes | | |
| Beractant | | |
| Bli tumomab | Antineoplastic Agents | US20120328618 |
| | Immunosuppressive Agents | |
| | Monoclo 1 antibodies | |
| | Antineoplastic and | |
| | Immunomodulating Agents | |
| C1 Esterase Inhibitor | | |
| (Human) | | |
| Coagulation Factor XIII A- | | |
| Subunit (Recombi nt) | | |
| Conestat alpha | | |
| Daratumumab | Antineoplastic Agents | |
| Desirudin | | |
| Dulaglutide | Hypoglycemic Agents; Drugs | |
| | Used in Diabetes; Alimentary | |
| | Tract and Metabolism; Blood | |
| | Glucose Lowering Drugs, Excl. | |
| | Insulins | |
| Elosulfase alpha | Enzymes; Alimentary Tract and | |
| | Metabolism | |
| Elotuzumab | | US2014055370 |
| Evolocumab | Lipid Modifying Agents, Plain; | |
| | Cardiovascular System | |
| Fibrinogen Concentrate | | |
| (Human) | | |
| Filgrastim-sndz | | |
| Gastric intrinsic factor | | |
| Hepatitis B immune | | |
| globulin | | |
| Human calcitonin | | |
| Human clostridium tetani | | |
| toxoid immune globulin | | |
| Human rabies virus | | |
| immune globulin | | |
| Human Rho(D) immune | | |
| globulin | | |
| Hyaluronidase (Human | | U.S. Pat. No. 7,767,429 |
| Recombi nt) | | |
| Idarucizumab | Anticoagulant | |
| Immune Globulin Human | Immunologic Factors; | |
| | Immunosuppressive Agents; Anti- | |
| | Infective Agents | |
| Vedolizumab | Immunosupressive agent, | US2012151248 |
| | Antineoplastic agent | |
| Ustekinumab | Deramtologic agent, | |
| | Immunosuppressive agent, | |
| | antineoplastic agent | |
| Turoctocog alpha | | |
| Tuberculin Purified Protein | | |
| Derivative | | |
| Simoctocog alpha | Antihaemorrhagics: blood | |
| | coagulation factor VIII | |
| Siltuximab | Antineoplastic and | U.S. Pat. No. 7,612,182 |
| | Immunomodulating Agents, | |
| | Immunosuppressive Agents | |
| Sebelipase alpha | Enzymes | |
| Sacrosidase | Enzymes | |
| Ramucirumab | Antineoplastic and | US2013067098 |
| | Immunomodulating Agents | |
| Prothrombin complex | | |
| concentrate | | |
| Poractant alpha | Pulmo ry Surfactants | |
| Pembrolizumab | Antineoplastic and | US2012135408 |
| | Immunomodulating Agents | |
| Peginterferon beta-1a | | |
| Ofatumumab | Antineoplastic and | U.S. Pat. No. 8,337,847 |
| | Immunomodulating Agents | |
| Obiltoxaximab | | |
| Nivolumab | Antineoplastic and | US2013173223 |
| | Immunomodulating Agents | |
| Necitumumab | | |
| Metreleptin | | US20070099836 |
| Methoxy polyethylene | | |
| glycol-epoetin beta | | |
| Mepolizumab | Antineoplastic and | US2008134721 |
| | Immunomodulating Agents, | |
| | Immunosuppressive Agents, | |
| | Interleukin Inhibitors | |
| Ixekizumab | | |
| Insulin Pork | Hypoglycemic Agents, | |
| | Antidiabetic Agents | |
| Insulin Degludec | | |
| Insulin Beef | | |
| Thyroglobulin | Hormone therapy | U.S. Pat. No. 5,099,001 |
| Anthrax immune globulin | Plasma derivative | |
| human | | |
| Anti-inhibitor coagulant | Blood Coagulation Factors, | |
| complex | Antihemophilic Agent | |
| Anti-thymocyte Globulin | Antibody | |
| (Equine) | | |
| Anti-thymocyte Globulin | Antibody | |
| (Rabbit) | | |
| Brodalumab | Antineoplastic and | |
| | Immunomodulating Agents | |
| C1 Esterase Inhibitor | Blood and Blood Forming Organs | |
| (Recombi nt) | | |
| Ca kinumab | Antineoplastic and | |
| | Immunomodulating Agents | |
| Chorionic Go dotropin | Hormones | U.S. Pat. No. 6,706,681 |
| (Human) | | |
| Chorionic Go dotropin | Hormones | U.S. Pat. No. 5,767,251 |
| (Recombi nt) | | |
| Coagulation factor X | Blood Coagulation Factors | |
| human | | |
| Dinutuximab | Antibody, Immunosuppresive | US20140170155 |
| | agent, Antineoplastic agent | |
| Efmoroctocog alpha | Antihemophilic Factor | |
| Factor IX Complex | Antihemophilic agent | |
| (Human) | | |
| Hepatitis A Vaccine | Vaccine | |
| Human Varicella-Zoster | Antibody | |
| Immune Globulin | | |
| Ibritumomab tiuxetan | Antibody, Immunosuppressive | CA2149329 |
| | Agents | |
| Lenograstim | Antineoplastic and | |
| | Immunomodulating Agents | |
| Pegloticase | Enzymes | |
| Protamine sulfate | Heparin Antagonists, Hematologic | |
| | Agents | |
| Protein S human | Anticoagulant plasma protein | |
| Sipuleucel-T | Antineoplastic and | U.S. Pat. No. 8,153,120 |
| | Immunomodulating Agents | |
| Somatropin recombi nt | Hormones, Hormone Substitutes, | CA1326439, CA2252535, |
| | and Hormone Antagonists | U.S. Pat. No. 5,288,703, |
| | | U.S. Pat. No. 5,849,700, |
| | | U.S. Pat. No. 5,849,704, |
| | | U.S. Pat. No. 5,898,030 |
| | | U.S. Pat. No. 6,004,297, |
| | | U.S. Pat. No. 6,152,897, |
| | | U.S. Pat. No. 6,235,004, |
| | | U.S. Pat. No. 6,899,699 |
| Susoctocog alpha | Blood coagulation factors, | |
| | Antihaemorrhagics | |
| Thrombomodulin alpha | Anticoagulant agent, Antiplatelet | |
| | agent | |

TABLE 29
Exemplary monoclonal antibody therapies.

| mAb | Target | Indication |
|---|---|---|
| Muromonab-CD3 | CD3 | Kidney transplant rejection |
| Abciximab | GPIIb/IIIa | Prevention of blood clots in angioplasty |
| Rituximab | CD20 | Non-Hodgkin lymphoma |
| Palivizumab | RSV | Prevention of respiratory syncytial virus |
| | | infection |
| Infliximab | TNFα | Crohn's disease |
| Trastuzumab | HER2 | Breast cancer |
| Alemtuzumab | CD52 | Chronic myeloid leukemia |
| Adalimumab | TNFα | Rheumatoid arthritis |
| Ibritumomab | CD20 | Non-Hodgkin lymphoma |
| tiuxetan | | |
| Omalizumab | IgE | Asthma |
| Cetuximab | EGFR | Colorectal cancer |
| Bevacizumab | VEGF-A | Colorectal cancer |
| Natalizumab | ITGA4 | Multiple sclerosis |
| Panitumumab | EGFR | Colorectal cancer |
| Ranibizumab | VEGF-A | Macular degeneration |
| Eculizumab | C5 | Paroxysmal nocturnal hemoglobinuria |
| Certolizumab | TNFα | Crohn's disease |
| pegol | | |
| Ustekinumab | IL-12/23 | Psoriasis |
| Canakinumab | IL-1β | Muckle-Wells syndrome |
| Golimumab | TNFα | Rheumatoid and psoriatic arthritis, ankylosing |
| | | spondylitis |
| Ofatumumab | CD20 | Chronic lymphocytic leukemia |
| Tocilizumab | IL-6R | Rheumatoid arthritis |
| Denosumab | RANKL | Bone loss |
| Belimumab | BLyS | Systemic lupus erythematosus |
| Ipilimumab | CTLA-4 | Metastatic melanoma |
| Brentuximab | CD30 | Hodgkin lymphoma, systemic anaplastic large |
| vedotin | | cell lymphoma |
| Pertuzumab | HER2 | Breast Cancer |
| Trastuzumab | HER2 | Breast cancer |
| emtansine | | |
| Raxibacumab | B. anthrasis PA | Anthrax infection |
| Obinutuzumab | CD20 | Chronic lymphocytic leukemia |
| Siltuximab | IL-6 | Castleman disease |
| Ramucirumab | VEGFR2 | Gastric cancer |
| Vedolizumab | α4β7 integrin | Ulcerative colitis, Crohn disease |
| Blinatumomab | CD19, CD3 | Acute lymphoblastic leukemia |
| Nivolumab | PD-1 | Melanoma, non-small cell lung cancer |
| Pembrolizumab | PD-1 | Melanoma |
| Idarucizumab | Dabigatran | Reversal of dabigatran-induced anticoagulation |
| Necitumumab | EGFR | Non-small cell lung cancer |
| Dinutuximab | GD2 | Neuroblastoma |
| Secukinumab | IL-17α | Psoriasis |
| Mepolizumab | IL-5 | Severe eosinophilic asthma |
| Alirocumab | PCSK9 | High cholesterol |
| Evolocumab | PCSK9 | High cholesterol |
| Daratumumab | CD38 | Multiple myeloma |
| Elotuzumab | SLAMF7 | Multiple myeloma |
| Ixekizumab | IL-17α | Psoriasis |
| Reslizumab | IL-5 | Asthma |
| Olaratumab | PDGFRα | Soft tissue sarcoma |
| Bezlotoxumab | Clostridium | Prevention of Clostridium difficile infection |
| | difficile enterotoxin B | recurrence |
| Atezolizumab | PD-L1 | Bladder cancer |
| Obiltoxaximab | B. anthrasis PA | Prevention of inhalational anthrax |
| Inotuzumab | CD22 | Acute lymphoblastic leukemia |
| ozogamicin | | |
| Brodalumab | IL-17R | Plaque psoriasis |
| Guselkumab | IL-23 p19 | Plaque psoriasis |
| Dupilumab | IL-4Rα | Atopic dermatitis |
| Sarilumab | IL-6R | Rheumatoid arthritis |
| Avelumab | PD-L1 | Merkel cell carcinoma |
| Ocrelizumab | CD20 | Multiple sclerosis |
| Emicizumab | Factor IXa, X | Hemophilia A |
| Benralizumab | IL-5Rα | Asthma |
| Gemtuzumab | CD33 | Acute myeloid leukemia |
| ozogamicin | | |
| Durvalumab | PD-L1 | Bladder cancer |
| Burosumab | FGF23 | X-linked hypophosphatemia |
| Lanadelumab | Plasma kallikrein | Hereditary angioedema attacks |
| Mogamulizumab | CCR4 | Mycosis fungoides or Sézary syndrome |
| Erenumab | CGRPR | Migraine prevention |
| Galcanezumab | CGRP | Migraine prevention |
| Tildrakizumab | IL-23 p19 | Plaque psoriasis |
| Cemiplimab | PD-1 | Cutaneous squamous cell carcinoma |
| Emapalumab | IFNγ | Primary hemophagocytic lymphohistiocytosis |
| Fremanezumab | CGRP | Migraine prevention |
| Ibalizumab | CD4 | HIV infection |
| Moxetumomab | CD22 | Hairy cell leukemia |
| pasudodox | | |
| Ravulizumab | C5 | Paroxysmal nocturnal hemoglobinuria |
| Caplacizumab | von Willebrand factor | Acquired thrombotic thrombocytopenia purpura |
| Romosozumab | Sclerostin | Osteoporosis in postmenopausal women at |
| | | increased risk of fracture |
| Risankizumab | IL-23 p19 | Plaque psoriasis |
| Polatuzumab | CD79β | Diffuse large B-cell lymphoma |
| vedotin | | |
| Brolucizumab | VEGF-A | Macular degeneration |
| Crizanlizumab | P-selectin | Sickle cell disease |

### Administration

[0884] The composition and systems described herein may be used in vitro or in vivo. In some embodiments the system or components of the system are delivered to cells (e.g., mammalian cells, e.g., human cells), e.g., in vitro or in vivo. In some embodiments, the cells are eukaryotic cells, e.g., cells of a multicellular organism, e.g., an animal, e.g., a mammal (e.g., human, swine, bovine) a bird (e.g., poultry, such as chicken, turkey, or duck), or a fish. In some embodiments, the cells are non-human animal cells (e.g., a laboratory animal, a livestock animal, or a companion animal). In some embodiments, the cell is a stem cell (e.g., a hematopoietic stem cell), a fibroblast, or a T cell. In some embodiments, the cell is a non-dividing cell, e.g., a non-dividing fibroblast or non-dividing T cell. In some embodiments, the cell is an HSC and p53 is not upregulated or is upregulated by less than 10%, 5%, 2%, or 1%, e.g., as determined according to the method described in Example 30 of PCT Application No. PCT/US2019/048607, incorporated herein by reference in its entirety. In some embodiments, the cell is a T cell, e.g., a primary T cell. In some embodiments, the cell is an induced pluripotent stem cell (iPSC). In some embodiments, the cell is a respiratory epithelial cell (e.g., a bronchial epithelial cell, e.g., a human bronchial epithelial (hBE) cell). The components of the gene modifying system may, in some instances, be delivered in the form of polypeptide, nucleic acid (e.g., DNA, RNA), and combinations thereof.

[0885] For instance, delivery can use any of the following combinations for delivering the retrotransposase (e.g., as DNA encoding the retrotransposase protein, as RNA encoding the retrotransposase protein, or as the protein itself) and the template RNA (e.g., as DNA encoding the RNA, or as RNA):
[0886] 1. Retrotransposase DNA+template DNA
[0887] 2. Retrotransposase RNA+template DNA
[0888] 3. Retrotransposase DNA+template RNA
[0889] 4. Retrotransposase RNA+template RNA
[0890] 5. Retrotransposase protein+template DNA
[0891] 6. Retrotransposase protein+template RNA
[0892] 7. Retrotransposase virus+template virus
[0893] 8. Retrotransposase virus+template DNA
[0894] 9. Retrotransposase virus+template RNA
[0895] 10. Retrotransposase DNA+template virus
[0896] 11. Retrotransposase RNA+template virus
[0897] 12. Retrotransposase protein+template virus

[0898] As indicated above, in some embodiments, the DNA or RNA that encodes the retrotransposase protein is delivered using a virus, and in some embodiments, the template RNA (or the DNA encoding the template RNA) is delivered using a virus.

[0899] In one embodiments, the system and/or components of the system are delivered as nucleic acid. For example, the gene modifying polypeptide may be delivered in the form of a DNA or RNA encoding the polypeptide and the template RNA may be delivered in the form of RNA or its complementary DNA to be transcribed into RNA. In some embodiments, the system or components of the system are delivered on 1, 2, 3, 4, or more distinct nucleic acid molecules. In some embodiments, the system or components of the system are delivered as a combination of DNA and RNA. In some embodiments, the system or components of the system are delivered as a combination of DNA and protein. In some embodiments, the system or components of the system are delivered as a combination of RNA and protein. In some embodiments, the gene modifying polypeptide is delivered as a protein.

[0900] In some embodiments, the system or components of the system are delivered to cells, e.g. mammalian cells or human cells, using a vector. The vector may be, e.g., a plasmid or a virus. In some embodiments, delivery is in vivo, in vitro, ex vivo, or in situ. In some embodiments, the virus is an adeno associated virus (AAV), a lentivirus, an adenovirus. In some embodiments, the system or components of the system are delivered to cells with a viral-like particle or a virosome. In some embodiments, the delivery uses more than one virus, viral-like particle, or virosome.

[0901] In some embodiments, nucleic acid (e.g., encoding a polypeptide, or a template DNA, or both) delivered to cells is covalently closed linear DNA, or so-called “doggybone” DNA. During its lifecycle, the bacteriophage N15 employs protelomerase to convert its genome from circular plasmid DNA to a linear plasmid DNA (Ravin et al. J Mol Biol 2001). This process has been adapted for the production of covalently closed linear DNA in vitro (see, for example, WO2010086626A1). In some embodiments, a protelomerase is contacted with a DNA containing one or more protelomerase recognition sites, wherein protelomerase results in a cut at the one or more sites and subsequent ligation of the complementary strands of DNA, resulting in the covalent linkage between the complementary strands. In some embodiments, nucleic acid (e.g., encoding a transposase, or a template DNA, or both) is first generated as circular plasmid DNA containing a single protelomerase recognition site that is then contacted with protelomerase to yield a covalently closed linear DNA. In some embodiments, nucleic acid (e.g., encoding a transposase, or a template DNA, or both) flanked by protelomerase recognition sites on plasmid or linear DNA is contacted with protelomerase to generate a covalently closed linear DNA containing only the DNA contained between the protelomerase recognition sites. In some embodiments, the approach of flanking the desired nucleic acid sequence by protelomerase recognition sites results in covalently closed circular DNA lacking plasmid elements used for bacterial cloning and maintenance. In some embodiments, the plasmid or linear DNA containing the nucleic acid and one or more protelomerase recognition sites is optionally amplified prior to the protelomerase reaction, e.g., by rolling circle amplification or PCR.

[0902] In one embodiment, the compositions and systems described herein can be formulated in liposomes or other similar vesicles. Liposomes are spherical vesicle structures composed of a uni- or multilamellar lipid bilayer surrounding internal aqueous compartments and a relatively impermeable outer lipophilic phospholipid bilayer. Liposomes may be anionic, neutral, or cationic. Liposomes are biocompatible, nontoxic, can deliver both hydrophilic and lipophilic drug molecules, protect their cargo from degradation by plasma enzymes, and transport their load across biological membranes and the blood brain barrier (BBB) (see, e.g., Spuch and Navarro, Journal of Drug Delivery, vol. 2011, Article ID 469679, 12 pages, 2011. doi:10.1155/2011/469679 for review).

[0903] Vesicles can be made from several different types of lipids; however, phospholipids are most commonly used to generate liposomes as drug carriers. Methods for preparation of multilamellar vesicle lipids are known in the art (see for example U.S. Pat. No. 6,693,086, the teachings of which relating to multilamellar vesicle lipid preparation are incorporated herein by reference). Although vesicle formation can be spontaneous when a lipid film is mixed with an aqueous solution, it can also be expedited by applying force in the form of shaking by using a homogenizer, sonicator, or an extrusion apparatus (see, e.g., Spuch and Navarro, Journal of Drug Delivery, vol. 2011, Article ID 469679, 12 pages, 2011. doi:10.1155/2011/469679 for review). Extruded lipids can be prepared by extruding through filters of decreasing size, as described in Templeton et al., Nature Biotech, 15:647-652, 1997, the teachings of which relating to extruded lipid preparation are incorporated herein by reference.

[0904] Lipid nanoparticles are another example of a carrier that provides a biocompatible and biodegradable delivery system for the pharmaceutical compositions described herein. Nanostructured lipid carriers (NLCs) are modified solid lipid nanoparticles (SLNs) that retain the characteristics of the SLN, improve drug stability and loading capacity, and prevent drug leakage. Polymer nanoparticles (PNPs) are an important component of drug delivery. These nanoparticles can effectively direct drug delivery to specific targets and improve drug stability and controlled drug release. Lipid-polymer nanoparticles (PLNs), a new type of carrier that combines liposomes and polymers, may also be employed. These nanoparticles possess the complementary advantages of PNPs and liposomes. A PLN is composed of a core-shell structure; the polymer core provides a stable structure, and the phospholipid shell offers good biocompatibility. As such, the two components increase the drug encapsulation efficiency rate, facilitate surface modification, and prevent leakage of water-soluble drugs. For a review, see, e.g., Li et al. 2017, Nanomaterials 7, 122; doi:10.3390/nano7060122.

[0905] Exosomes can also be used as drug delivery vehicles for the compositions and systems described herein. For a review, see Ha et al. July 2016. Acta Pharmaceutica Sinica B. Volume 6, Issue 4, Pages 287-296; doi.org/10.1016/j.apsb.2016.02.001.

[0906] Fusosomes interact and fuse with target cells, and thus can be used as delivery vehicles for a variety of molecules. They generally consist of a bilayer of amphipathic lipids enclosing a lumen or cavity and a fusogen that interacts with the amphipathic lipid bilayer. The fusogen component has been shown to be engineerable in order to confer target cell specificity for the fusion and payload delivery, allowing the creation of delivery vehicles with programmable cell specificity (see, for example, the relating to fusosome design, preparation, and usage in PCT Publication No. WO/2020014209, incorporated herein by reference in its entirety).

[0907] A gene modifying system can be introduced into cells, tissues, and multicellular organisms. In some embodiments, the system or components of the system are delivered to the cells via mechanical means or physical means.

[0908] Formulation of protein therapeutics is described in Meyer (Ed.), Therapeutic Protein Drug Products: Practical Approaches to formulation in the Laboratory, Manufacturing, and the Clinic, Woodhead Publishing Series (2012).

### Tissue Specific Activity Administration

[0909] In some embodiments, a system, template RNA, or polypeptide described herein is administered to or is active in (e.g., is more active in) a target tissue, e.g., a first tissue. In some embodiments, the system, template RNA, or polypeptide is not administered to or is less active in (e.g., not active in) a non-target tissue. In some embodiments, a system, template RNA, or polypeptide described herein is useful for modifying DNA in a target tissue, e.g., a first tissue, (e.g., and not modifying DNA in a non-target tissue).

[0910] In some embodiments, a system comprises (a) a polypeptide described herein or a nucleic acid encoding the same, (b) a template nucleic acid (e.g., template RNA) described herein, and (c) one or more first tissue-specific expression-control sequences specific to the target tissue, wherein the one or more first tissue-specific expression-control sequences specific to the target tissue are in operative association with (a), (b), or (a) and (b), wherein, when associated with (a), (a) comprises a nucleic acid encoding the polypeptide.

[0911] In some embodiments, the nucleic acid in (b) comprises RNA.

[0912] In some embodiments, the nucleic acid in (b) comprises DNA.

[0913] In some embodiments, the nucleic acid in (b): (i) is single-stranded or comprises a single-stranded segment, e.g., is single-stranded DNA or comprises a single-stranded segment and one or more double stranded segments; (ii) has inverted terminal repeats; or (iii) both (i) and (ii).

[0914] In some embodiments, the nucleic acid in (b) is double-stranded or comprises a double-stranded segment.

[0915] In some embodiments, (a) comprises a nucleic acid encoding the polypeptide.

[0916] In some embodiments, the nucleic acid in (a) comprises RNA.

[0917] In some embodiments, the nucleic acid in (a) comprises DNA.

[0918] In some embodiments, the nucleic acid in (a): (i) is single-stranded or comprises a single-stranded segment, e.g., is single-stranded DNA or comprises a single-stranded segment and one or more double stranded segments; (ii) has inverted terminal repeats; or (iii) both (i) and (ii).

[0919] In some embodiments, the nucleic acid in (a) is double-stranded or comprises a double-stranded segment.

[0920] In some embodiments, the nucleic acid in (a), (b), or (a) and (b) is linear.

[0921] In some embodiments, the nucleic acid in (a), (b), or (a) and (b) is circular, e.g., a plasmid or minicircle.

[0922] In some embodiments, the heterologous object sequence is in operative association with a first promoter.

[0923] In some embodiments, the one or more first tissue-specific expression-control sequences comprises a tissue specific promoter.

[0924] In some embodiments, the tissue-specific promoter comprises a first promoter in operative association with: i. the heterologous object sequence, ii. a nucleic acid encoding the transposase, or iii. (i) and (ii).

[0925] In some embodiments, the one or more first tissue-specific expression-control sequences comprises a tissue-specific microRNA recognition sequence in operative association with: i. the heterologous object sequence, ii. a nucleic acid encoding the transposase, or iii. (i) and (ii).

[0926] In some embodiments, a system comprises a tissue-specific promoter, and the system further comprises one or more tissue-specific microRNA recognition sequences, wherein: i. the tissue specific promoter is in operative association with: I. the heterologous object sequence, II. a nucleic acid encoding the transposase, or III. (I) and (II); and/or ii. the one or more tissue-specific microRNA recognition sequences are in operative association with: I. the heterologous object sequence, II. a nucleic acid encoding the transposase, or III.(I) and (II).

[0927] In some embodiments, wherein (a) comprises a nucleic acid encoding the polypeptide, the nucleic acid comprises a promoter in operative association with the nucleic acid encoding the polypeptide.

[0928] In some embodiments, the nucleic acid encoding the polypeptide comprises one or more second tissue-specific expression-control sequences specific to the target tissue in operative association with the polypeptide coding sequence.

[0929] In some embodiments, the one or more second tissue-specific expression-control sequences comprises a tissue specific promoter.

[0930] In some embodiments, the tissue-specific promoter is the promoter in operative association with the nucleic acid encoding the polypeptide.

[0931] In some embodiments, the one or more second tissue-specific expression-control sequences comprises a tissue-specific microRNA recognition sequence.

[0932] In some embodiments, the promoter in operative association with the nucleic acid encoding the polypeptide is a tissue-specific promoter, the system further comprising one or more tissue-specific microRNA recognition sequences.

[0933] In some embodiments, a gene modifying system described herein is delivered to a tissue or cell from the cerebrum, cerebellum, adrenal gland, ovary, pancreas, parathyroid gland, hypophysis, testis, thyroid gland, breast, spleen, tonsil, thymus, lymph node, bone marrow, lung, cardiac muscle, esophagus, stomach, small intestine, colon, liver, salivary gland, kidney, prostate, blood, or other cell or tissue type. In some embodiments, a gene modifying system described herein is used to treat a disease, such as a cancer, inflammatory disease, infectious disease, genetic defect, or other disease. A cancer can be cancer of the cerebrum, cerebellum, adrenal gland, ovary, pancreas, parathyroid gland, hypophysis, testis, thyroid gland, breast, spleen, tonsil, thymus, lymph node, bone marrow, lung, cardiac muscle, esophagus, stomach, small intestine, colon, liver, salivary gland, kidney, prostate, blood, or other cell or tissue type, and can include multiple cancers.

[0934] In some embodiments, a gene modifying system described herein described herein is administered by enteral administration (e.g. oral, rectal, gastrointestinal, sublingual, sublabial, or buccal administration). In some embodiments, a gene modifying system described herein is administered by parenteral administration (e.g., intravenous, intramuscular, subcutaneous, intradermal, epidural, intracerebral, intracerebroventricular, epicutaneous, nasal, intra-arterial, intra-articular, intracavernous, intraocular, intraosseous infusion, intraperitoneal, intrathecal, intrauterine, intravaginal, intravesical, perivascular, or transmucosal administration). In some embodiments, a gene modifying system described herein is administered by topical administration (e.g., transdermal administration).

[0935] In some embodiments, a gene modifying system as described herein can be used to modify an animal cell, plant cell, or fungal cell. In some embodiments, a gene modifying system as described herein can be used to modify a mammalian cell (e.g., a human cell). In some embodiments, a gene modifying system as described herein can be used to modify a cell from a livestock animal (e.g., a cow, horse, sheep, goat, pig, llama, alpaca, camel, yak, chicken, duck, goose, or ostrich). In some embodiments, a gene modifying system as described herein can be used as a laboratory tool or a research tool, or used in a laboratory method or research method, e.g., to modify an animal cell, e.g., a mammalian cell (e.g., a human cell), a plant cell, or a fungal cell.

[0936] In some embodiments, a gene modifying system as described herein can be used to express a protein, template, or heterologous object sequence (e.g., in an animal cell, e.g., a mammalian cell (e.g., a human cell), a plant cell, or a fungal cell). In some embodiments, a gene modifying system as described herein can be used to express a protein, template, or heterologous object sequence under the control of an inducible promoter (e.g., a small molecule inducible promoter). In some embodiments, a gene modifying system or payload thereof is designed for tunable control, e.g., by the use of an inducible promoter. For example, a promoter, e.g., Tet, driving a gene of interest may be silent at integration, but may, in some instances, activated upon exposure to a small molecule inducer, e.g., doxycycline. In some embodiments, the tunable expression allows post-treatment control of a gene (e.g., a therapeutic gene), e.g., permitting a small molecule-dependent dosing effect. In embodiments, the small molecule-dependent dosing effect comprises altering levels of the gene product temporally and/or spatially, e.g., by local administration. In some embodiments, a promoter used in a system described herein may be inducible, e.g., responsive to an endogenous molecule of the host and/or an exogenous small molecule administered thereto.

[0937] In some embodiments, a gene modifying g system is used to make changes to non-coding and/or regulatory control regions, e.g., to tune the expression of endogenous genes. In some embodiments, a gene modifying system is used to induce upregulation or downregulation of gene expression. In some embodiments, a regulatory control region comprises one or more of a promoter, enhancer, UTR, CTCF site, and/or a gene expression control region.

[0938] In some embodiments, a gene modifying system may be used to treat or prevent a repeat expansion disease (e.g., a disease of Table 26), or to reduce the severity or a symptom thereof. In some embodiments, the repeat expansion disease comprises expansion of a trinucleotide repeat. In some embodiments, the subject has at least 10, 20, 30, 40, or 50 copies of the repeat. In embodiments, the repeat expansion disease is an inherited disease. Non-limiting examples of repeat expansion diseases include Huntington's disease (HD) and myotonic dystrophy. For example, healthy individuals may possess between 10 and 35 tandem copies of the CAG trinucleotide repeat, while Huntington's patients frequently possess >40 copies, which can result, e.g., in an elongated and dysfunctional Huntingtin protein. In some embodiments, a gene modifying system corrects a repeat expansion, e.g., by recognizing DNA at the terminus of the repeat region and nicking one strand. In some embodiments, the template RNA component of the gene modifying system comprises a region with a number of repeats characteristic of a healthy subject, e.g., about 20 repeats (e.g., between 5-10, 10-15, 15-20, 20-25, 25-30, 30-35, or 35-40 repeats). In some embodiments, a second strand nick and second strand synthesis then results in the integration of the newly copied DNA comprising a correct number of repeats (e.g., as described herein). In some embodiments, the system recognizes DNA at the terminus of the repeat region and the template carries the information for the new number of repeats. In embodiments, a gene modifying system can be used in this way regardless of the number of repeats present in an individual and/or in an individual cell. Owing to the presence of multiple repeats, an alternative non-gene modifying therapeutic (e.g., a CRISPR-based homologous recombination therapeutic) might, in some embodiments, result in unpredictable repair behavior. Further non-limiting examples of repeat expansion diseases and the causative repeats can be found, for example, in La Spada and Taylor Nat Rev Genet 11(4):247-258 (2010), which is incorporated herein by reference in its entirety.

[0939] In some embodiments, a gene modifying system may be used to treat a healthy individual, e.g., as a preventative therapy. Gene modifying systems can, in some embodiments, be targeted to generate mutations, e.g., that have been shown to be protective towards a disease of interest. An exemplary list of such diseases and protective mutation targets can be found in Table 22.

[0940] In some embodiments, a nucleic acid component of a system provided by the invention a sequence (e.g., encoding the polypeptide or comprising a heterologous object sequence) is flanked by untranslated regions (UTRs) that modify protein expression levels. Various 5′ and 3′ UTRs can affect protein expression. For example, in some embodiments, the coding sequence may be preceded by a 5′ UTR that modifies RNA stability or protein translation. In some embodiments, the sequence may be followed by a 3′ UTR that modifies RNA stability or translation. In some embodiments, the sequence may be preceded by a 5′ UTR and followed by a 3′ UTR that modify RNA stability or translation. In some embodiments, the 5′ and/or 3′ UTR may be selected from the 5′ and 3′ UTRs of complement factor 3 (C3) (cactcctccccatcctctccctctgtccctctgtccctctgaccctgcactgtcccagcacc (SEQ ID NO: 15435)) or orosomucoid 1 (ORM1) (caggacacagccttggatcaggacagagacttgggggccatcctgcccctccaacccgacatgtgtacctcagctttttccctcacttgcat caataaagcttctgtgtttggaacagctaa (SEQ ID NO: 15436)) (Asrani et al. RNA Biology 2018). In certain embodiments, the 5′ UTR is the 5′ UTR from C3 and the 3′ UTR is the 3′ UTR from ORM1.

[0941] In certain embodiments, a 5′ UTR and 3′ UTR for protein expression, e.g., mRNA (or DNA encoding the RNA) for a gene modifying polypeptide or heterologous object sequence, comprise optimized expression sequences. In some embodiments, the 5′ UTR comprises GGGAAAUAAGAGAGAAAAGAAGAGUAAGAAGAAAUAUAAGAGCCACC (SEQ ID NO: 15430) and/or the 3′ UTR comprising UGAUAAUAGGCUGGAGCCUCGGUGGCCAUGCUUCUUGCCCCUUGGGCCUCCCCCC AGCCCCUCCUCCCCUUCCUGCACCCGUACCCCCGUGGUCUUUGAAUAAAGUCUGA (SEQ ID NO: 15431), e.g., as described in Richner et al. Cell 168(6): P1114-1125 (2017), the sequences of which are incorporated herein by reference.

[0942] In some embodiments, a 5′ and/or 3′ UTR may be selected to enhance protein expression. In some embodiments, a 5′ and/or 3′ UTR may be selected to modify protein expression such that overproduction inhibition is minimized. In some embodiments, UTRs are around a coding sequence, e.g., outside the coding sequence and in other embodiments proximal to the coding sequence. In some embodiments, additional regulatory elements (e.g., miRNA binding sites, cis-regulatory sites) are included in the UTRs.

[0943] In some embodiments, an open reading frame (ORF) of a gene modifying system, e.g., an ORF of an mRNA (or DNA encoding an mRNA) encoding a gene modifying polypeptide or one or more ORFs of an mRNA (or DNA encoding an mRNA) of a heterologous object sequence, is flanked by a 5′ and/or 3′ untranslated region (UTR) that enhances the expression thereof. In some embodiments, the 5′ UTR of an mRNA component (or transcript produced from a DNA component) of the system comprises the sequence 5′-GGGAAAUAAGAGAGAAAAGAAGAGUAAGAAGAAAUAUAAGAGCCACC-3′ (SEQ ID NO: 15430). In some embodiments, the 3′ UTR of an mRNA component (or transcript produced from a DNA component) of the system comprises the sequence 5′-UGAUAAUAGGCUGGAGCCUCGGUGGCCAUGCUUCUUGCCCCUUGGGCCUCCCCCC AGCCCCUCCUCCCCUUCCUGCACCCGUACCCCCGUGGUCUUUGAAUAAAGUCUGA-3′ (SEQ ID NO: 15431). This combination of 5′ UTR and 3′ UTR has been shown to result in desirable expression of an operably linked ORF by Richner et al. Cell 168(6): P1114-1125 (2017), the teachings and sequences of which are incorporated herein by reference. In some embodiments, a system described herein comprises a DNA encoding a transcript, wherein the DNA comprises the corresponding 5′ UTR and 3′ UTR sequences, with T substituting for U in the above-listed sequence). In some embodiments, a DNA vector used to produce an RNA component of the system further comprises a promoter upstream of the 5′ UTR for initiating in vitro transcription, e.g, a T7, T3, or SP6 promoter. The 5′ UTR above begins with GGG, which is a suitable start for optimizing transcription using T7 RNA polymerase. For tuning transcription levels and altering the transcription start site nucleotides to fit alternative 5′ UTRs, the teachings of Davidson et al. Pac Symp Biocomput 433-443 (2010) describe T7 promoter variants, and the methods of discovery thereof, that fulfill both of these traits.

### Viral Vectors and Components Thereof

[0944] Viruses are a useful source of delivery vehicles for the systems described herein In some embodiments, the virus used as a gene modifying delivery system may be selected from a group as described by Baltimore Bacteriol Rev 35(3):235-241 (1971).

[0945] In some embodiments, the virus is selected from a Group I virus, e.g., is a DNA virus and packages dsDNA into virions. In some embodiments, the Group I virus is selected from, e.g., Adenoviruses, Herpesviruses, Poxviruses.

[0946] In some embodiments, the virus is selected from a Group II virus, e.g., is a DNA virus and packages ssDNA into virions. In some embodiments, the Group II virus is selected from, e.g., Parvoviruses. In some embodiments, the parvovirus is a dependoparvovirus, e.g., an adeno-associated virus (AAV).

[0947] In some embodiments, the virus is selected from a Group III virus, e.g., is an RNA virus and packages dsRNA into virions. In some embodiments, the Group III virus is selected from, e.g., Reoviruses. In some embodiments, one or both strands of the dsRNA contained in such virions is a coding molecule able to serve directly as mRNA upon transduction into a host cell, e.g., can be directly translated into protein upon transduction into a host cell without requiring any intervening nucleic acid replication or polymerization steps.

[0948] In some embodiments, the virus is selected from a Group IV virus, e.g., is an RNA virus and packages ssRNA(+) into virions. In some embodiments, the Group IV virus is selected from, e.g., Coronaviruses, Picornaviruses, Togaviruses. In some embodiments, the ssRNA(+) contained in such virions is a coding molecule able to serve directly as mRNA upon transduction into a host cell, e.g., can be directly translated into protein upon transduction into a host cell without requiring any intervening nucleic acid replication or polymerization steps.

[0949] In some embodiments, the virus is selected from a Group V virus, e.g., is an RNA virus and packages ssRNA(−) into virions. In some embodiments, the Group V virus is selected from, e.g., Orthomyxoviruses, Rhabdoviruses. In some embodiments, an RNA virus with an ssRNA(−) genome also carries an enzyme inside the virion that is transduced to host cells with the viral genome, e.g., an RNA-dependent RNA polymerase, capable of copying the ssRNA(−) into ssRNA(+) that can be translated directly by the host.

[0950] In some embodiments, the virus is selected from a Group VI virus, e.g., is a retrovirus and packages ssRNA(+) into virions. In some embodiments, the Group VI virus is selected from, e.g., Retroviruses. In some embodiments, the retrovirus is a lentivirus, e.g., HIV-1, HIV-2, SIV, BIV. In some embodiments, the retrovirus is a spumavirus, e.g., a foamy virus, e.g., HFV, SFV, BFV. In some embodiments, the ssRNA(+) contained in such virions is a coding molecule able to serve directly as mRNA upon transduction into a host cell, e.g., can be directly translated into protein upon transduction into a host cell without requiring any intervening nucleic acid replication or polymerization steps. In some embodiments, the ssRNA(+) is first reverse transcribed and copied to generate a dsDNA genome intermediate from which mRNA can be transcribed in the host cell. In some embodiments, an RNA virus with an ssRNA(+) genome also carries an enzyme inside the virion that is transduced to host cells with the viral genome, e.g., an RNA-dependent DNA polymerase, capable of copying the ssRNA(+) into dsDNA that can be transcribed into mRNA and translated by the host. In some embodiments, the reverse transcriptase from a Group VI retrovirus is incorporated as the reverse transcriptase domain of a gene modifying polypeptide.

[0951] In some embodiments, the virus is selected from a Group VII virus, e.g., is a retrovirus and packages dsRNA into virions. In some embodiments, the Group VII virus is selected from, e.g., Hepadnaviruses. In some embodiments, one or both strands of the dsRNA contained in such virions is a coding molecule able to serve directly as mRNA upon transduction into a host cell, e.g., can be directly translated into protein upon transduction into a host cell without requiring any intervening nucleic acid replication or polymerization steps. In some embodiments, one or both strands of the dsRNA contained in such virions is first reverse transcribed and copied to generate a dsDNA genome intermediate from which mRNA can be transcribed in the host cell. In some embodiments, an RNA virus with a dsRNA genome also carries an enzyme inside the virion that is transduced to host cells with the viral genome, e.g., an RNA-dependent DNA polymerase, capable of copying the dsRNA into dsDNA that can be transcribed into mRNA and translated by the host. In some embodiments, the nucleic acid in a virion may comprise DNA, e.g., linear ssDNA, linear dsDNA, circular ssDNA, circular dsDNA, minicircle DNA, dbDNA, ceDNA. In some embodiments, the nucleic acid in a virion may comprise RNA, e.g., linear ssRNA, linear dsRNA, circular ssRNA, circular dsRNA. In some embodiments, a viral genome may circularize upon transduction into a host cell, e.g., a linear ssRNA molecule may undergo a covalent linkage to form a circular ssRNA, a linear dsRNA molecule may undergo a covalent linkage to form a circular dsRNA or one or more circular ssRNA. In some embodiments, a viral genome may replicate by rolling circle replication in a host cell. In some embodiments, a viral genome may comprise a single nucleic acid molecule, e.g., comprise a non-segmented genome. In some embodiments, a viral genome may comprise two or more nucleic acid molecules, e.g., comprise a segmented genome. In some embodiments, a nucleic acid in a virion may be associated with one or proteins. In some embodiments, a virion used as a delivery vehicle may comprise a commensal human virus. In some embodiments, a virion used as a delivery vehicle may comprise an anellovirus, the use of which is described in WO2018232017A1, which is incorporated herein by reference in its entirety.

### Adeno-Associated Viruses

[0952] In some embodiments, the virus is an adeno-associated virus (AAV). In some embodiments, the AAV genome comprises two genes that encode four replication proteins and three capsid proteins, respectively. In some embodiments, the genes are flanked on either side by 145-bp inverted terminal repeats (ITRs). In some embodiments, the virion comprises up to three capsid proteins (Vp1, Vp2, and/or Vp3), e.g., produced in a 1:1:10 ratio. In some embodiments, the capsid proteins are produced from the same open reading frame and/or from differential splicing (Vp1) and alternative translational start sites (Vp2 and Vp3, respectively). Generally, Vp3 is the most abundant subunit in the virion and participates in receptor recognition at the cell surface defining the tropism of the virus. In some embodiments, Vp1 comprises a phospholipase domain, e.g., which functions in viral infectivity, in the N-terminus of Vp1.

[0953] In some embodiments, packaging capacity of the viral vectors limits the size of the base editor that can be packaged into the vector. For example, the packaging capacity of the AAVs can be about 4.5 kb (e.g., about 3.0, 3.5, 4.0, 4.5, 5.0, 5.5, or 6.0 kb), e.g., including one or two inverted terminal repeats (ITRs), e.g., 145 base ITRs.

[0954] In some embodiments, recombinant AAV (rAAV) comprises cis-acting 145-bp ITRs flanking vector transgene cassettes, e.g., providing up to 4.5 kb for packaging of foreign DNA. Subsequent to infection, rAAV can, in some instances, express an exogenous protein and persist without integration into the host genome by existing episomally in circular head-to-tail concatemers. rAAV can be used, for example, in vitro and in vivo. In some embodiments, AAV-mediated gene delivery requires that the length of the coding sequence of the gene is equal or greater in size than the wild-type AAV genome.

[0955] AAV delivery of genes that exceed this size and/or the use of large physiological regulatory elements can be accomplished, for example, by dividing the protein(s) to be delivered into two or more fragments. In some embodiments, the N-terminal fragment is fused to a split intein-N. In some embodiments, the C-terminal fragment is fused to a split intein-C. In embodiments, the fragments are packaged into two or more AAV vectors.

[0956] In some embodiments, dual AAV vectors are generated by splitting a large transgene expression cassette in two separate halves (5 and 3 ends, or head and tail), e.g., wherein each half of the cassette is packaged in a single AAV vector (of <5 kb). The re-assembly of the full-length transgene expression cassette can, in some embodiments, then be achieved upon co-infection of the same cell by both dual AAV vectors. In some embodiments, co-infection is followed by one or more of: (1) homologous recombination (HR) between 5 and 3 genomes (dual AAV overlapping vectors); (2) ITR-mediated tail-to-head concatemerization of 5 and 3 genomes (dual AAV trans-splicing vectors); and/or (3) a combination of these two mechanisms (dual AAV hybrid vectors). In some embodiments, the use of dual AAV vectors in vivo results in the expression of full-length proteins. In some embodiments, the use of the dual AAV vector platform represents an efficient and viable gene transfer strategy for transgenes of greater than about 4.0, 4.1, 4.2, 4.3, 4.4, 4.5, 4.6, 4.7, 4.8, 4.9, or 5.0 kb in size. In some embodiments, AAV vectors can also be used to transduce cells with target nucleic acids, e.g., in the in vitro production of nucleic acids and peptides. In some embodiments, AAV vectors can be used for in vivo and ex vivo gene therapy procedures (see, e.g., West et al., Virology 160:38-47 (1987); U.S. Pat. No. 4,797,368; WO 93/24641; Kotin, Human Gene Therapy 5:793-801 (1994); Muzyczka, J. Clin. Invest. 94:1351 (1994); each of which is incorporated herein by reference in their entirety). The construction of recombinant AAV vectors is described in a number of publications, including U.S. Pat. No. 5,173,414; Tratschin et al., Mol. Cell. Biol. 5:3251-3260 (1985); Tratschin, et al., Mol. Cell. Biol. 4:2072-2081 (1984); Hermonat & Muzyczka, PNAS 81:6466-6470 (1984); and Samulski et al., J. Virol. 63:03822-3828 (1989) (incorporated by reference herein in their entirety).

[0957] In some embodiments, a gene modifying system described herein (e.g., with or without one or more guide nucleic acids) can be delivered using AAV, lentivirus, adenovirus or other plasmid or viral vector types, in particular, using formulations and doses from, for example, U.S. Pat. No. 8,454,972 (formulations, doses for adenovirus), U.S. Pat. No. 8,404,658 (formulations, doses for AAV) and U.S. Pat. No. 5,846,946 (formulations, doses for DNA plasmids) and from clinical trials and publications regarding the clinical trials involving lentivirus, AAV and adenovirus. For example, for AAV, the route of administration, formulation and dose can be as described in U.S. Pat. No. 8,454,972 and as in clinical trials involving AAV. For Adenovirus, the route of administration, formulation and dose can be as described in U.S. Pat. No. 8,404,658 and as in clinical trials involving adenovirus. For plasmid delivery, the route of administration, formulation and dose can be as described in U.S. Pat. No. 5,846,946 and as in clinical studies involving plasmids. Doses can be based on or extrapolated to an average 70 kg individual (e.g. a male adult human), and can be adjusted for patients, subjects, mammals of different weight and species. Frequency of administration is within the ambit of the medical or veterinary practitioner (e.g., physician, veterinarian), depending on usual factors including the age, sex, general health, other conditions of the patient or subject and the particular condition or symptoms being addressed. In some embodiments, the viral vectors can be injected into the tissue of interest. For cell-type specific gene editing, the expression of the gene modifying polypeptide and optional guide nucleic acid can, in some embodiments, be driven by a cell-type specific promoter.

[0958] In some embodiments, AAV allows for low toxicity, for example, due to the purification method not requiring ultracentrifugation of cell particles that can activate the immune response. In some embodiments, AAV allows low probability of causing insertional mutagenesis, for example, because it does not substantially integrate into the host genome.

[0959] In some embodiments, AAV has a packaging limit of about 4.4, 4.5, 4.6, 4.7, or 4.75 kb. In some embodiments, a gene modifying polypeptide, promoter, and transcription terminator can fit into a single viral vector. SpCas9 (4.1 kb) may, in some instances, be difficult to package into AAV. Therefore, in some embodiments, a gene modifying polypeptide is used that is shorter in length than other gene modifying polypeptides or base editors. In some embodiments, the gene modifying polypeptides are less than about 4.5 kb, 4.4 kb, 4.3 kb, 4.2 kb, 4.1 kb, 4 kb, 3.9 kb, 3.8 kb, 3.7 kb, 3.6 kb, 3.5 kb, 3.4 kb, 3.3 kb, 3.2 kb, 3.1 kb, 3 kb, 2.9 kb, 2.8 kb, 2.7 kb, 2.6 kb, 2.5 kb, 2 kb, or 1.5 kb.

[0960] An AAV can be AAV1, AAV2, AAV5 or any combination thereof. In some embodiments, the type of AAV is selected with respect to the cells to be targeted; e.g., AAV serotypes 1, 2, 5 or a hybrid capsid AAV1, AAV2, AAV5 or any combination thereof can be selected for targeting brain or neuronal cells; or AAV4 can be selected for targeting cardiac tissue. In some embodiments, AAV8 is selected for delivery to the liver. Exemplary AAV serotypes as to these cells are described, for example, in Grimm, D. et al, J. Virol. 82: 5887-5911 (2008) (incorporated herein by reference in its entirety). In some embodiments, AAV refers all serotypes, subtypes, and naturally-occurring AAV as well as recombinant AAV. AAV may be used to refer to the virus itself or a derivative thereof. In some embodiments, AAV includes AAV1, AAV2, AAV3, AAV3B, AAV4, AAV5, AAV6, AAV6.2, AAV7, AAVrh.64R1, AAVhu.37, AAVrh.8, AAVrh.32.33, AAV8, AAV9, AAV-DJ, AAV2/8, AAVrhlO, AAVLK03, AV10, AAV11, AAV 12, rhAlO, and hybrids thereof, avian AAV, bovine AAV, canine AAV, equine AAV, primate AAV, nonprimate AAV, and ovine AAV. The genomic sequences of various serotypes of AAV, as well as the sequences of the native terminal repeats (TRs), Rep proteins, and capsid subunits are known in the art. Such sequences may be found in the literature or in public databases such as GenBank. Additional exemplary AAV serotypes are listed in Table 36.

TABLE 36
Exemplary AAV serotypes.

| Target | | |
|---|---|---|
| Tissue | Vehicle | Reference |
| Liver | AAV (AAV8¹, AAVrh.8¹, | 1. Wang et al., Mol. Ther. 18, |
| | AAVhu.37¹, AAV2/8, | 118-25 (2010) |
| | AAV2/rh10², AAV9, AAV2, | 2. Ginn et al., JHEP Reports, |
| | NP40³, NP59^{2,3}, AAV3B⁵, | 100065 (2019) |
| | AAV-DJ⁴, AAV-LK01⁴, | 3. Paulk et al., Mol. Ther. 26, |
| | AAV-LK02⁴, AAV-LK03⁴, | 289-303 (2018). |
| | AAV-LK19⁴ | 4. L. Lisowski et al., Nature. |
| | Adenovirus (Ad5, HC-AdV⁶) | 506, 382-6 (2014). |
| | | 5. L. Wang et al., Mol. Ther. |
| | | 23, 1877-87 (2015). |
| | | 6. Hausl Mol Ther (2010) |
| Lung | AAV (AAV4, AAV5, | 1. Duncan et al., Mol Ther |
| | AAV6¹, AAV9, H22²) | Methods Clin Dev (2018) |
| | Adenovirus (Ad5, Ad3, | 2. Cooney et al., Am J Respir |
| | Ad21, Ad14)³ | Cell Mol Biol (2019) |
| | | 3. Li et al., Mol Ther Methods |
| | | Clin Dev (2019) |
| Skin | AAV (AAV6¹, AAV-LK19²) | 1. Petek et al., Mol. Ther. |
| | | (2010) |
| | | 2. L. Lisowski et al., Nature. |
| | | 506, 382-6 (2014). |
| HSCs | Adenovirus (HDAd5/35⁺⁺) | Wang et al. Blood Adv (2019) |

[0961] In some embodiments, a pharmaceutical composition (e.g., comprising an AA V as described herein) has less than 10% empty capsids, less than 8% empty capsids, less than 7% empty capsids, less than 5% empty capsids, less than 3% empty capsids, or less than 1% empty capsids. In some embodiments, the pharmaceutical composition has less than about 5% empty capsids. In some embodiments, the number of empty capsids is below the limit of detection. In some embodiments, it is advantageous for the pharmaceutical composition to have low amounts of empty capsids, e.g., because empty capsids may generate an adverse response (e.g., immune response, inflammatory response, liver response, and/or cardiac response), e.g., with little or no substantial therapeutic benefit.

[0962] In some embodiments, the residual host cell protein (rHCP) in the pharmaceutical composition is less than or equal to 100 ng/ml rHCP per 1×10¹³ vg/ml, e.g., less than or equal to 40 ng/ml rHCP per 1×10¹³ vg/ml or 1-50 ng/ml rHCP per 1×10¹³ vg/ml. In some embodiments, the pharmaceutical composition comprises less than 10 ng rHCP per 1.0×10¹³ vg, or less than 5 ng rHCP per 1.0×10¹³ vg, less than 4 ng rHCP per 1.0×10¹³ vg, or less than 3 ng rHCP per 1.0×10¹³ vg, or any concentration in between. In some embodiments, the residual host cell DNA (hcDNA) in the pharmaceutical composition is less than or equal to 5×10⁶ pg/ml hcDNA per 1×10¹³ vg/ml, less than or equal to 1.2×10⁶ pg/ml hcDNA per 1×10¹³ vg/ml, or 1×10⁵ μg/ml hcDNA per 1×10¹³ vg/ml. In some embodiments, the residual host cell DNA in said pharmaceutical composition is less than 5.0×10⁵ pg per 1×10¹³ vg, less than 2.0×10⁵ pg per 1.0×10¹³ vg, less than 1.1×10⁵ μg per 1.0×10¹³ vg, less than 1.0×10⁵ pg hcDNA per 1.0×10¹³ vg, less than 0.9×10⁵ pg hcDNA per 1.0×10¹³ vg, less than 0.8×10⁵ pg hcDNA per 1.0×10¹³ vg, or any concentration in between.

[0963] In some embodiments, the residual plasmid DNA in the pharmaceutical composition is less than or equal to 1.7×10⁵ pg/ml per 1.0×10¹³ vg/ml, or 1×10⁵ pg/ml per 1×1.0×10¹³ vg/ml, or 1.7×10⁶ pg/ml per 1.0×10¹³ vg/ml. In some embodiments, the residual DNA plasmid in the pharmaceutical composition is less than 10.0×10⁵ pg by 1.0×10¹³ vg, less than 8.0×10⁵ pg by 1.0×10¹³ vg or less than 6.8×10⁵ pg by 1.0×10¹³ vg. In embodiments, the pharmaceutical composition comprises less than 0.5 ng per 1.0×10¹³ vg, less than 0.3 ng per 1.0×10¹³ vg, less than 0.22 ng per 1.0×10¹³ vg or less than 0.2 ng per 1.0×10¹³ vg or any intermediate concentration of bovine serum albumin (BSA). In embodiments, the benzonase in the pharmaceutical composition is less than 0.2 ng by 1.0×10¹³ vg, less than 0.1 ng by 1.0×10¹³ vg, less than 0.09 ng by 1.0×10¹³ vg, less than 0.08 ng by 1.0×10¹³ vg or any intermediate concentration. In embodiments, Poloxamer 188 in the pharmaceutical composition is about 10 to 150 ppm, about 15 to 100 ppm or about 20 to 80 ppm. In embodiments, the cesium in the pharmaceutical composition is less than 50 pg/g (ppm), less than 30 pg/g (ppm) or less than 20 pg/g (ppm) or any intermediate concentration.

[0964] In embodiments, the pharmaceutical composition comprises total impurities, e.g., as determined by SDS-PAGE, of less than 10%, less than 8%, less than 7%, less than 6%, less than 5%, less than 4%, less than 3%, less than 2%, or any percentage in between. In embodiments, the total purity, e.g., as determined by SDS-PAGE, is greater than 90%, greater than 92%, greater than 93%, greater than 94%, greater than 95%, greater than 96%, greater than 97%, greater than 98%, or any percentage in between. In embodiments, no single unnamed related impurity, e.g., as measured by SDS-PAGE, is greater than 5%, greater than 4%, greater than 3% or greater than 2%, or any percentage in between. In embodiments, the pharmaceutical composition comprises a percentage of filled capsids relative to total capsids (e.g., peak 1+peak 2 as measured by analytical ultracentrifugation) of greater than 85%, greater than 86%, greater than 87%, greater than 88%, greater than 89%, greater than 90%, greater than 91%, greater than 91.9%, greater than 92%, greater than 93%, or any percentage in between. In embodiments of the pharmaceutical composition, the percentage of filled capsids measured in peak 1 by analytical ultracentrifugation is 20-80%, 25-75%, 30-75%, 35-75%, or 37.4-70.3%. In embodiments of the pharmaceutical composition, the percentage of filled capsids measured in peak 2 by analytical ultracentrifugation is 20-80%, 20-70%, 22-65%, 24-62%, or 24.9-60.1%.

[0965] In one embodiment, the pharmaceutical composition comprises a genomic titer of 1.0 to 5.0×10¹³ vg/mL, 1.2 to 3.0×10¹³ vg/mL or 1.7 to 2.3×10¹³ vg/ml. In one embodiment, the pharmaceutical composition exhibits a biological load of less than 5 CFU/mL, less than 4 CFU/mL, less than 3 CFU/mL, less than 2 CFU/mL or less than 1 CFU/mL or any intermediate contraction. In embodiments, the amount of endotoxin according to USP, for example, USP <85> (incorporated by reference in its entirety) is less than 1.0 EU/mL, less than 0.8 EU/mL or less than 0.75 EU/mL. In embodiments, the osmolarity of a pharmaceutical composition according to USP, for example, USP <785> (incorporated by reference in its entirety) is 350 to 450 mOsm/kg, 370 to 440 mOsm/kg or 390 to 430 mOsm/kg. In embodiments, the pharmaceutical composition contains less than 1200 particles that are greater than 25 m per container, less than 1000 particles that are greater than 25 μm per container, less than 500 particles that are greater than 25 μm per container or any intermediate value. In embodiments, the pharmaceutical composition contains less than 10,000 particles that are greater than 10 m per container, less than 8000 particles that are greater than 10 μm per container or less than 600 particles that are greater than 10 μm per container.

[0966] In one embodiment, the pharmaceutical composition has a genomic titer of 0.5 to 5.0×10¹³ vg/mL, 1.0 to 4.0×10¹³ vg/mL, 1.5 to 3.0×10¹³ vg/ml or 1.7 to 2.3×10¹³ vg/ml. In one embodiment, the pharmaceutical composition described herein comprises one or more of the following: less than about 0.09 ng benzonase per 1.0×10¹³ vg, less than about 30 pg/g (ppm) of cesium, about 20 to 80 ppm Poloxamer 188, less than about 0.22 ng BSA per 1.0×10¹³ vg, less than about 6.8×10 5 μg of residual DNA plasmid per 1.0×10¹³ vg, less than about 1.1×10⁵ μg of residual hcDNA per 1.0×10¹³ vg, less than about 4 ng of rHCP per 1.0×10¹³ vg, pH 7.7 to 8.3, about 390 to 430 mOsm/kg, less than about 600 particles that are >25 m in size per container, less than about 6000 particles that are >10 μm in size per container, about 1.7×10¹³-2.3×10¹³ vg/mL genomic titer, infectious titer of about 3.9×10⁸ to 8.4×10¹⁰ IU per 1.0×10¹³ vg, total protein of about 100-300 pg per 1.0×10¹³ vg, mean survival of >24 days in A7SMA mice with about 7.5×10¹³ vg/kg dose of viral vector, about 70 to 130% relative potency based on an in vitro cell based assay and/or less than about 5% empty capsid. In various embodiments, the pharmaceutical compositions described herein comprise any of the viral particles discussed here, retain a potency of between ±20%, between ±15%, between ±10% or within ±5% of a reference standard. In some embodiments, potency is measured using a suitable in vitro cell assay or in vivo animal model.

[0967] Additional methods of preparation, characterization, and dosing AAV particles are taught in WO2019094253, which is incorporated herein by reference in its entirety.

[0968] Additional rAAV constructs that can be employed consonant with the invention include those described in Wang et al 2019, available at: //doi.org/10.1038/s41573-019-0012-9, including Table 1 thereof, which is incorporated by reference in its entirety.

### AAV Administration

[0969] In some embodiments, an adeno-associated virus (AAV) is used in conjunction with the system, template nucleic acid, and/or polypeptide described herein. In some embodiments, an AAV is used to deliver, administer, or package the system, template nucleic acid, and/or polypeptide described herein. In some embodiments, the AAV is a recombinant AAV (rAAV).

[0970] In some embodiments, a system comprises (a) a polypeptide described herein or a nucleic acid encoding the same, (b) a template nucleic acid (e.g., template RNA) described herein, and (c) one or more first tissue-specific expression-control sequences specific to the target tissue, wherein the one or more first tissue-specific expression-control sequences specific to the target tissue are in operative association with (a), (b), or (a) and (b), wherein, when associated with (a), (a) comprises a nucleic acid encoding the polypeptide.

[0971] In some embodiments, a system described herein further comprises a first recombinant adeno-associated virus (rAAV) capsid protein; wherein the at least one of (a) or (b) is associated with the first rAAV capsid protein, wherein at least one of (a) or (b) is flanked by AAV inverted terminal repeats (ITRs).

[0972] In some embodiments, (a) and (b) are associated with the first rAAV capsid protein.

[0973] In some embodiments, (a) and (b) are on a single nucleic acid.

[0974] In some embodiments, the system further comprises a second rAAV capsid protein, wherein at least one of (a) or (b) is associated with the second rAAV capsid protein, and wherein the at least one of (a) or (b) associated with the second rAAV capsid protein is different from the at least one of (a) or (b) is associated with the first rAAV capsid protein.

[0975] In some embodiments, the at least one of (a) or (b) is associated with the first or second rAAV capsid protein is dispersed in the interior of the first or second rAAV capsid protein, which first or second rAAV capsid protein is in the form of an AAV capsid particle.

[0976] In some embodiments, the system further comprises a nanoparticle, wherein the nanoparticle is associated with at least one of (a) or (b).

[0977] In some embodiments, (a) and (b), respectively are associated with: a) a first rAAV capsid protein and a second rAAV capsid protein; b) a nanoparticle and a first rAAV capsid protein; c) a first rAAV capsid protein; d) a first adenovirus capsid protein; e) a first nanoparticle and a second nanoparticle; or f) a first nanoparticle.

[0978] Viral vectors are useful for delivering all or part of a system provided by the invention, e.g., for use in methods provided by the invention. Systems derived from different viruses have been employed for the delivery of polypeptides, nucleic acids, or transposons; for example: integrase-deficient lentivirus, adenovirus, adeno-associated virus (AAV), herpes simplex virus, and baculovirus (reviewed in Hodge et al. Hum Gene Ther 2017; Narayanavari et al. Crit Rev Biochem Mol Biol 2017; Boehme et al. Curr Gene Ther 2015).

[0979] Adenoviruses are common viruses that have been used as gene delivery vehicles given well-defined biology, genetic stability, high transduction efficiency, and ease of large-scale production (see, for example, review by Lee et al. Genes & Diseases 2017). They possess linear dsDNA genomes and come in a variety of serotypes that differ in tissue and cell tropisms. In order to prevent replication of infectious virus in recipient cells, adenovirus genomes used for packaging are deleted of some or all endogenous viral proteins, which are provided in trans in viral production cells. This renders the genomes helper-dependent, meaning they can only be replicated and packaged into viral particles in the presence of the missing components provided by so-called helper functions. A helper-dependent adenovirus system with all viral ORFs removed may be compatible with packaging foreign DNA of up to ˜37 kb (Parks et al. J Virol 1997). In some embodiments, an adenoviral vector is used to deliver DNA corresponding to the polypeptide or template component of the gene modifying system, or both are contained on separate or the same adenoviral vector. In some embodiments, the adenovirus is a helper-dependent adenovirus (HD-AdV) that is incapable of self-packaging. In some embodiments, the adenovirus is a high-capacity adenovirus (HC-AdV) that has had all or a substantial portion of endogenous viral ORFs deleted, while retaining the necessary sequence components for packaging into adenoviral particles. For this type of vector, the only adenoviral sequences required for genome packaging are noncoding sequences: the inverted terminal repeats (ITRs) at both ends and the packaging signal at the 5′-end (Jager et al. Nat Protoc 2009). In some embodiments, the adenoviral genome also comprises stuffer DNA to meet a minimal genome size for optimal production and stability (see, for example, Hausl et al. Mol Ther 2010). Adenoviruses have been used in the art for the delivery of transposons to various tissues. In some embodiments, an adenovirus is used to deliver a gene modifying system to the liver.

[0980] In some embodiments, an adenovirus is used to deliver a gene modifying system to HSCs, e.g., HDAd5/35++. HDAd5/35++ is an adenovirus with modified serotype 35 fibers that de-target the vector from the liver (Wang et al. Blood Adv 2019). In some embodiments, the adenovirus that delivers a gene modifying system to HSCs utilizes a receptor that is expressed specifically on primitive HSCs, e.g., CD46.

[0981] Adeno-associated viruses (AAV) belong to the parvoviridae family and more specifically constitute the dependoparvovirus genus. The AAV genome is composed of a linear single-stranded DNA molecule which contains approximately 4.7 kilobases (kb) and consists of two major open reading frames (ORFs) encoding the non-structural Rep (replication) and structural Cap (capsid) proteins. A second ORF within the cap gene was identified that encodes the assembly-activating protein (AAP). The DNAs flanking the AAV coding regions are two cis-acting inverted terminal repeat (ITR) sequences, approximately 145 nucleotides in length, with interrupted palindromic sequences that can be folded into energetically stable hairpin structures that function as primers of DNA replication. In addition to their role in DNA replication, the ITR sequences have been shown to be involved in viral DNA integration into the cellular genome, rescue from the host genome or plasmid, and encapsidation of viral nucleic acid into mature virions (Muzyczka, (1992) Curr. Top. Micro. Immunol. 158:97-129). In some embodiments, one or more gene modifying nucleic acid components is flanked by ITRs derived from AAV for viral packaging. See, e.g., WO2019113310.

[0982] In some embodiments, one or more components of the gene modifying system are carried via at least one AAV vector. In some embodiments, the at least one AAV vector is selected for tropism to a particular cell, tissue, organism. In some embodiments, the AAV vector is pseudotyped, e.g., AAV2/8, wherein AAV2 describes the design of the construct but the capsid protein is replaced by that from AAV8. It is understood that any of the described vectors could be pseudotype derivatives, wherein the capsid protein used to package the AAV genome is derived from that of a different AAV serotype. In some embodiments, an AAV to be employed for gene editing may be evolved for novel cell or tissue tropism as has been demonstrated in the literature (e.g., Davidsson et al. Proc Natl Acad Sci USA 2019).

[0983] In some embodiments, the AAV delivery vector is a vector which has two AAV inverted terminal repeats (ITRs) and a nucleotide sequence of interest (for example, a sequence coding for a gene modifying polypeptide or a DNA template, or both), each of said ITRs having an interrupted (or noncontiguous) palindromic sequence, i.e., a sequence composed of three segments: a first segment and a last segment that are identical when read 5′->3′ but hybridize when placed against each other, and a segment that is different that separates the identical segments. Such sequences, notably the ITRs, form hairpin structures. See, for example, WO2012123430.

[0984] Conventionally, AAV virions with capsids are produced by introducing a plasmid or plasmids encoding the rAAV or scAAV genome, Rep proteins, and Cap proteins (Grimm et al, 1998). Upon introduction of these helper plasmids in trans, the AAV genome is “rescued” (i.e., released and subsequently recovered) from the host genome, and is further encapsidated to produce infectious AAV. In some embodiments, one or more gene modifying nucleic acids are packaged into AAV particles by introducing the ITR-flanked nucleic acids into a packaging cell in conjunction with the helper functions.

[0985] In some embodiments, the AAV genome is a so called self-complementary genome (referred to as scAAV), such that the sequence located between the ITRs contains both the desired nucleic acid sequence (e.g., DNA encoding the gene modifying polypeptide or template, or both) in addition to the reverse complement of the desired nucleic acid sequence, such that these two components can fold over and self-hybridize. In some embodiments, the self-complementary modules are separated by an intervening sequence that permits the DNA to fold back on itself, e.g., forms a stem-loop. An scAAV has the advantage of being poised for transcription upon entering the nucleus, rather than being first dependent on ITR priming and second-strand synthesis to form dsDNA. In some embodiments, one or more gene modifying components is designed as an scAAV, wherein the sequence between the AAV ITRs contains two reverse complementing modules that can self-hybridize to create dsDNA.

[0986] In some embodiments, nucleic acid (e.g., encoding a polypeptide, or a template, or both) delivered to cells is closed-ended, linear duplex DNA (CELiD DNA or ceDNA). In some embodiments, ceDNA is derived from the replicative form of the AAV genome (Li et al. PLoS One 2013). In some embodiments, the nucleic acid (e.g., encoding a polypeptide, or a template DNA, or both) is flanked by ITRs, e.g., AAV ITRs, wherein at least one of the ITRs comprises a terminal resolution site and a replication protein binding site (sometimes referred to as a replicative protein binding site). In some embodiments, the ITRs are derived from an adeno-associated virus, e.g., AAV1, AAV2, AAV3, AAV4, AAV5, AAV6, AAV7, AAV8, AAV9, AAV10, AAV11, AAV12, or a combination thereof. In some embodiments, the ITRs are symmetric. In some embodiments, the ITRs are asymmetric. In some embodiments, at least one Rep protein is provided to enable replication of the construct. In some embodiments, the at least one Rep protein is derived from an adeno-associated virus, e.g., AAV1, AAV2, AAV3, AAV4, AAV5, AAV6, AAV7, AAV8, AAV9, AAV10, AAV11, AAV12, or a combination thereof. In some embodiments, ceDNA is generated by providing a production cell with (i) DNA flanked by ITRs, e.g., AAV ITRs, and (ii) components required for ITR-dependent replication, e.g., AAV proteins Rep78 and Rep52 (or nucleic acid encoding the proteins). In some embodiments, ceDNA is free of any capsid protein, e.g., is not packaged into an infectious AAV particle. In some embodiments, ceDNA is formulated into LNPs (see, for example, WO2019051289A1).

[0987] In some embodiments, the ceDNA vector consists of two self complementary sequences, e.g., asymmetrical or symmetrical or substantially symmetrical ITRs as defined herein, flanking said expression cassette, wherein the ceDNA vector is not associated with a capsid protein. In some embodiments, the ceDNA vector comprises two self-complementary sequences found in an AAV genome, where at least one ITR comprises an operative Rep-binding element (RBE) (also sometimes referred to herein as “RBS”) and a terminal resolution site (trs) of AAV or a functional variant of the RBE. See, for example, WO2019113310.

### Lipid Nanoparticles

[0988] The methods and systems provided by the invention may employ any suitable carrier or delivery modality, including, in certain embodiments, lipid nanoparticles (LNPs). Lipid nanoparticles, in some embodiments, comprise one or more ionic lipids, such as non-cationic lipids (e.g., neutral or anionic, or zwitterionic lipids); one or more conjugated lipids (such as PEG-conjugated lipids or lipids conjugated to polymers described in Table 5 of WO2019217941; incorporated herein by reference in its entirety); one or more sterols (e.g., cholesterol); and, optionally, one or more targeting molecules (e.g., conjugated receptors, receptor ligands, antibodies); or combinations of the foregoing.

[0989] Lipids that can be used in nanoparticle formations (e.g., lipid nanoparticles) include, for example those described in Table 4 of WO2019217941, which is incorporated by reference e.g., a lipid-containing nanoparticle can comprise one or more of the lipids in table 4 of WO2019217941. Lipid nanoparticles can include additional elements, such as polymers, such as the polymers described in table 5 of WO2019217941, incorporated by reference.

[0990] In some embodiments, conjugated lipids, when present, can include one or more of PEG-diacylglycerol (DAG) (such as 1-(monomethoxy-polyethyleneglycol)-2,3-dimyristoylglycerol (PEG-DMG)), PEG-dialkyloxypropyl (DAA), PEG-phospholipid, PEG-ceramide (Cer), a pegylated phosphatidylethanoloamine (PEG-PE), PEG succinate diacylglycerol (PEGS-DAG) (such as 4-0-(2′,3′-di(tetradecanoyloxy)propyl-1-0-(w-methoxy(polyethoxy)ethyl) butanedioate (PEG-S-DMG)), PEG dialkoxypropylcarbam, N-(carbonyl-methoxypoly ethylene glycol 2000)-1,2-distearoyl-sn-glycero-3-phosphoethanolamine sodium salt, and those described in Table 2 of WO2019051289 (incorporated by reference), and combinations of the foregoing.

[0991] In some embodiments, sterols that can be incorporated into lipid nanoparticles include one or more of cholesterol or cholesterol derivatives, such as those in WO2009/127060 or US2010/0130588, which are incorporated by reference. Additional exemplary sterols include phytosterols, including those described in Eygeris et al (2020), dx.doi.org/10.1021/acs.nanolett.0c01386, incorporated herein by reference.

[0992] In some embodiments, the lipid particle comprises an ionizable lipid, a non-cationic lipid, a conjugated lipid that inhibits aggregation of particles, and a sterol. The amounts of these components can be varied independently and to achieve desired properties. For example, in some embodiments, the lipid nanoparticle comprises an ionizable lipid is in an amount from about 20 mol % to about 90 mol % of the total lipids (in other embodiments it may be 20-70% (mol), 30-60% (mol) or 40-50% (mol); about 50 mol % to about 90 mol % of the total lipid present in the lipid nanoparticle), a non-cationic lipid in an amount from about 5 mol % to about 30 mol % of the total lipids, a conjugated lipid in an amount from about 0.5 mol % to about 20 mol % of the total lipids, and a sterol in an amount from about 20 mol % to about 50 mol % of the total lipids. The ratio of total lipid to nucleic acid (e.g., encoding the gene modifying polypeptide or template nucleic acid) can be varied as desired. For example, the total lipid to nucleic acid (mass or weight) ratio can be from about 10:1 to about 30:1.

[0993] In some embodiments, an ionizable lipid may be a cationic lipid, an ionizable cationic lipid, e.g., a cationic lipid that can exist in a positively charged or neutral form depending on pH, or an amine-containing lipid that can be readily protonated. In some embodiments, the cationic lipid is a lipid capable of being positively charged, e.g., under physiological conditions. Exemplary cationic lipids include one or more amine group(s), which bear the positive charge. In some embodiments, the lipid particle comprises a cationic lipid in formulation with one or more of neutral lipids, ionizable amine-containing lipids, biodegradable alkyn lipids, steroids, phospholipids including polyunsaturated lipids, structural lipids (e.g., sterols), PEG, cholesterol and polymer conjugated lipids. In some embodiments, the cationic lipid may be an ionizable cationic lipid. An exemplary cationic lipid as disclosed herein may have an effective pKa over 6.0. In embodiments, a lipid nanoparticle may comprise a second cationic lipid having a different effective pKa (e.g., greater than the first effective pKa), than the first cationic lipid. A lipid nanoparticle may comprise between 40 and 60 mol percent of a cationic lipid, a neutral lipid, a steroid, a polymer conjugated lipid, and a therapeutic agent, e.g., a nucleic acid (e.g., RNA) described herein (e.g., a template nucleic acid or a nucleic acid encoding a gene modifying polypeptide), encapsulated within or associated with the lipid nanoparticle. In some embodiments, the nucleic acid is co-formulated with the cationic lipid. The nucleic acid may be adsorbed to the surface of an LNP, e.g., an LNP comprising a cationic lipid. In some embodiments, the nucleic acid may be encapsulated in an LNP, e.g., an LNP comprising a cationic lipid. In some embodiments, the lipid nanoparticle may comprise a targeting moiety, e.g., coated with a targeting agent. In embodiments, the LNP formulation is biodegradable. In some embodiments, a lipid nanoparticle comprising one or more lipid described herein, e.g., Formula (i), (ii), (ii), (vii) and/or (ix) encapsulates at least 1%, at least 5%, at least 10%, at least 20%, at least 30%, at least 40%, at least 50%, at least 60%, at least 70%, at least 80%, at least 90%, at least 92%, at least 95%, at least 97%, at least 98% or 100% of an RNA molecule, e.g., template RNA and/or a mRNA encoding the gene modifying polypeptide.

[0994] In some embodiments, the lipid to nucleic acid ratio (mass/mass ratio; w/w ratio) can be in the range of from about 1:1 to about 25:1, from about 10:1 to about 14:1, from about 3:1 to about 15:1, from about 4:1 to about 10:1, from about 5:1 to about 9:1, or about 6:1 to about 9:1. The amounts of lipids and nucleic acid can be adjusted to provide a desired N/P ratio, for example, N/P ratio of 3, 4, 5, 6, 7, 8, 9, 10 or higher. Generally, the lipid nanoparticle formulation's overall lipid content can range from about 5 mg/ml to about 30 mg/mL.

[0995] Exemplary ionizable lipids that can be used in lipid nanoparticle formulations include, without limitation, those listed in Table 1 of WO2019051289, incorporated herein by reference. Additional exemplary lipids include, without limitation, one or more of the following formulae: X of US2016/0311759; I of US20150376115 or in US2016/0376224; I, 11 or III of US20160151284; I, IA, II, or IIA of US20170210967; I-c of US20150140070; A of US2013/0178541; I of US2013/0303587 or US2013/0123338; I of US2015/0141678; II, III, IV, or V of US2015/0239926; I of US2017/0119904; I or II of WO2017/117528; A of US2012/0149894; A of US2015/0057373; A of WO2013/116126; A of US2013/0090372; A of US2013/0274523; A of US2013/0274504; A of US2013/0053572; A of WO2013/016058; A of WO2012/162210; I of US2008/042973; I, II, III, or IV of US2012/01287670; I or II of US2014/0200257; I, II, or III of US2015/0203446; I or III of US2015/0005363; I, IA, IB, IC, ID, II, IIA, IIB, IIC, IID, or III-XXIV of US2014/0308304; of US2013/0338210; I, II, III, or IV of WO2009/132131; A of US2012/01011478; I or XXXV of US2012/0027796; XIV or XVII of US2012/0058144; of US2013/0323269; I of US2011/0117125; I, II, or III of US2011/0256175; I, II, III, IV, V, VI, VII, VIII, IX, X, XI, XII of US2012/0202871; I, II, III, IV, V, VI, VII, VIII, X, XII, XIII, XIV, XV, or XVI of US2011/0076335; I or II of US2006/008378; I of US2013/0123338; I or X-A-Y-Z of US2015/0064242; XVI, XVII, or XVIII of US2013/0022649; I, II, or III of US2013/0116307; I, II, or III of US2013/0116307; I or II of US2010/0062967; I-X of US2013/0189351; I of US2014/0039032; V of US2018/0028664; I of US2016/0317458; I of US2013/0195920; 5, 6, or 10 of U.S. Pat. No. 10,221,127; III-3 of WO2018/081480; I-5 or I-8 of WO2020/081938; 18 or 25 of U.S. Pat. No. 9,867,888; A of US2019/0136231; II of WO2020/219876; 1 of US2012/0027803; OF-02 of US2019/0240349; 23 of U.S. Pat. No. 10,086,013; cKK-E12/A6 of Miao et al (2020); C12-200 of WO2010/053572; 7C1 of Dahlman et al (2017); 304-O13 or 503-013 of Whitehead et al; TS-P4C2 of U.S. Pat. No. 9,708,628; I of WO2020/106946; I of WO2020/106946.

[0996] In some embodiments, the ionizable lipid is MC3 (6Z,9Z,28Z,31Z)-heptatriaconta-6,9,28,31-tetraen-19-yl-4-(dimethylamino) butanoate (DLin-MC3-DMA or MC3), e.g., as described in Example 9 of WO2019051289A9 (incorporated by reference herein in its entirety). In some embodiments, the ionizable lipid is the lipid ATX-002, e.g., as described in Example 10 of WO2019051289A9 (incorporated by reference herein in its entirety). In some embodiments, the ionizable lipid is (13Z,16Z)-A,A-dimethyl-3-nonyldocosa-13, 16-dien-1-amine (Compound 32), e.g., as described in Example 11 of WO2019051289A9 (incorporated by reference herein in its entirety). In some embodiments, the ionizable lipid is Compound 6 or Compound 22, e.g., as described in Example 12 of WO2019051289A9 (incorporated by reference herein in its entirety). In some embodiments, the ionizable lipid is heptadecan-9-yl 8-((2-hydroxyethyl)(6-oxo-6-(undecyloxy)hexyl)amino)octanoate (SM-102); e.g., as described in Example 1 of U.S. Pat. No. 9,867,888 (incorporated by reference herein in its entirety). In some embodiments, the ionizable lipid is 9Z,12Z)-3-((4,4-bis(octyloxy)butanoyl)oxy)-2-((((3-(diethylamino)propoxy)carbonyl)oxy)methyl)propyl octadeca-9,12-dienoate (LP01) e.g., as synthesized in Example 13 of WO2015/095340 (incorporated by reference herein in its entirety). In some embodiments, the ionizable lipid is Di((Z)-non-2-en-1-yl) 9-((4-dimethylamino)butanoyl)oxy)heptadecanedioate (L319), e.g. as synthesized in Example 7, 8, or 9 of US2012/0027803 (incorporated by reference herein in its entirety). In some embodiments, the ionizable lipid is 1,1′-((2-(4-(2-((2-(Bis(2-hydroxydodecyl)amino)ethyl)(2-hydroxydodecyl) amino)ethyl)piperazin-1-yl)ethyl)azanediyl)bis(dodecan-2-ol) (C12-200), e.g., as synthesized in Examples 14 and 16 of WO2010/053572 (incorporated by reference herein in its entirety). In some embodiments, the ionizable lipid is; Imidazole cholesterol ester (ICE) lipid (3S, 10R, 13R, 17R)-10, 13-dimethyl-17-((R)-6-methylheptan-2-yl)-2, 3, 4, 7, 8, 9, 10, 11, 12, 13, 14, 15, 16, 17-tetradecahydro-1H-cyclopenta[a]phenanthren-3-yl 3-(1H-imidazol-4-yl)propanoate, e.g., Structure (I) from WO2020/106946 (incorporated by reference herein in its entirety).

[0997] Some non-limiting example of lipid compounds that may be used (e.g., in combination with other lipid components) to form lipid nanoparticles for the delivery of compositions described herein, e.g., nucleic acid (e.g., RNA) described herein (e.g., a template nucleic acid or a nucleic acid encoding a gene modifying polypeptide) includes,

[chemical structure]

[0998] In some embodiments, an LNP comprising Formula (i) is used to deliver a gene modifying composition described herein to the cells, e.g., liver and/or hepatocyte cells.

[chemical structure]

[0999] In some embodiments, an LNP comprising Formula (ii) is used to deliver a gene modifying composition described herein to the cells, e.g., liver and/or hepatocyte cells.

[chemical structure]

[1000] In some embodiments, an LNP comprising Formula (iii) is used to deliver a gene modifying composition described herein to the cells, e.g., liver and/or hepatocyte cells.

[chemical structure]

[1001] In some embodiments, an LNP comprising Formula (v) is used to deliver a gene modifying composition described herein to the cells, e.g., liver and/or hepatocyte cells.

[chemical structure]

[1002] In some embodiments, an LNP comprising Formula (vi) is used to deliver a gene modifying composition described herein to the cells, e.g., liver and/or hepatocyte cells.

[chemical structure]

[1003] In some embodiments, an LNP comprising Formula (viii) is used to deliver a gene modifying composition described herein to the cells, e.g., liver and/or hepatocyte cells.

[chemical structure]

[1004] In some embodiments, an LNP comprising Formula (ix) is used to deliver a gene modifying composition described herein to the cells, e.g., liver and/or hepatocyte cells.

[chemical structure]

wherein:
[1005] X¹ is O, NR¹, or a direct bond, X² is C2-5 alkylene, X³ is C(═O) or a direct bond, R¹ is H or Me, R³ is Ci-3 alkyl, R² is Ci-3 alkyl, or R² taken together with the nitrogen atom to which it is attached and 1-3 carbon atoms of X² form a 4-, 5-, or 6-membered ring, or X¹ is NR¹, R¹ and R² taken together with the nitrogen atoms to which they are attached form a 5- or 6-membered ring, or R² taken together with R³ and the nitrogen atom to which they are attached form a 5-, 6-, or 7-membered ring, Y¹ is C2-12 alkylene, Y² is selected from

[chemical structure]

(in either n is 0 to 3, R⁴ is Ci-15 alkyl, Z¹ is Ci-6 alkylene or a direct bond,
Z² is

[chemical structure]

(in either orientation) or absent, provided that if Z¹ is a direct bond, Z² is absent;
[1006] R⁵ is C5-9 alkyl or C6-10 alkoxy, R⁶ is C5-9 alkyl or C6-10 alkoxy, W is methylene or a direct bond, and R⁷ is H or Me, or a salt thereof, provided that if R³ and R² are C2 alkyls, X¹ is O, X² is linear C3 alkylene, X³ is C(═O), Y¹ is linear Ce alkylene, (Y²)n-R⁴ is

[chemical structure]

[1007] R⁴ is linear C5 alkyl, Z¹ is C2 alkylene, Z² is absent, W is methylene, and R⁷ is H, then R⁵ and R⁶ are not Cx alkoxy.

[1008] In some embodiments, an LNP comprising Formula (xii) is used to deliver a gene modifying composition described herein to the cells, e.g., liver and/or hepatocyte cells.

[chemical structure]

[1009] In some embodiments, an LNP comprising Formula (xi) is used to deliver a gene modifying composition described herein to the cells, e.g., liver and/or hepatocyte cells.

[chemical structure]

[1010] In some embodiments, an LNP comprises a compound of Formula (xiii) and a compound of Formula (xiv).

[chemical structure]

[1011] In some embodiments, an LNP comprising Formula (xv) is used to deliver a gene modifying composition described herein to the cells, e.g., liver and/or hepatocyte cells.

[chemical structure]

[1012] In some embodiments, an LNP comprising a formulation of Formula (xvi) is used to deliver a gene modifying composition described herein to the cells, e.g., lung endothelial cells.

[chemical structure]

[chemical structure]

[1013] In some embodiments, a lipid compound used to form lipid nanoparticles for the delivery of compositions described herein, e.g., nucleic acid (e.g., RNA) described herein (e.g., a template nucleic acid or a nucleic acid encoding agene modifying polypeptide) is made by one of the following reactions.

[chemical structure]

[1014] Exemplary non-cationic lipids include, but are not limited to, distearoyl-sn-glycero-phosphoethanolamine, distearoylphosphatidylcholine (DSPC), dioleoylphosphatidylcholine (DOPC), dipalmitoylphosphatidylcholine (DPPC), dioleoylphosphatidylglycerol (DOPG), 1,2-dioleoyl-sn-glycero-3-phosphoethanolamine (DOPE), dipalmitoylphosphatidylglycerol (DPPG), dioleoyl-phosphatidylethanolamine (DOPE), palmitoyloleoylphosphatidylcholine (POPC), palmitoyloleoylphosphatidylethanolamine (POPE), dioleoyl-phosphatidylethanolamine 4-(N-maleimidomethyl)-cyclohexane-1-carboxylate (DOPE-mal), dipalmitoyl phosphatidyl ethanolamine (DPPE), dimyristoylphosphoethanolamine (DMPE), distearoyl-phosphatidyl-ethanolamine (DSPE), monomethyl-phosphatidylethanolamine (such as 16-O-monomethyl PE), dimethyl-phosphatidylethanolamine (such as 16-O-dimethyl PE), 18-1-trans PE, 1-stearoyl-2-oleoyl-phosphatidyethanolamine (SOPE), hydrogenated soy phosphatidylcholine (HSPC), egg phosphatidylcholine (EPC), dioleoylphosphatidylserine (DOPS), sphingomyelin (SM), dimyristoyl phosphatidylcholine (DMPC), dimyristoyl phosphatidylglycerol (DMPG), distearoylphosphatidylglycerol (DSPG), dierucoylphosphatidylcholine (DEPC), palmitoyloleyolphosphatidylglycerol (POPG), dielaidoyl-phosphatidylethanolamine (DEPE), lecithin, phosphatidylethanolamine, lysolecithin, lysophosphatidylethanolamine, phosphatidylserine, phosphatidylinositol, sphingomyelin, egg sphingomyelin (ESM), cephalin, cardiolipin, phosphatidicacid, cerebrosides, dicetylphosphate, lysophosphatidylcholine, dilinoleoylphosphatidylcholine, or mixtures thereof. It is understood that other diacylphosphatidylcholine and diacylphosphatidylethanolamine phospholipids can also be used. The acyl groups in these lipids are preferably acyl groups derived from fatty acids having C10-C24 carbon chains, e.g., lauroyl, myristoyl, paimitoyl, stearoyl, or oleoyl. Additional exemplary lipids, in certain embodiments, include, without limitation, those described in Kim et al. (2020) dx.doi.org/10.1021/acs.nanolett.0c01386, incorporated herein by reference. Such lipids include, in some embodiments, plant lipids found to improve liver transfection with mRNA (e.g., DGTS In some embodiments, the non-cationic lipid may have the following structure,

[chemical structure]

[1015] Other examples of non-cationic lipids suitable for use in the lipid nanoparticles include, without limitation, nonphosphorous lipids such as, e.g., stearylamine, dodeeylamine, hexadecylamine, acetyl palmitate, glycerol ricinoleate, hexadecyl stereate, isopropyl myristate, amphoteric acrylic polymers, triethanolamine-lauryl sulfate, alkyl-aryl sulfate polyethyloxylated fatty acid amides, dioctadecyl dimethyl ammonium bromide, ceramide, sphingomyelin, and the like. Other non-cationic lipids are described in WO2017/099823 or US patent publication US2018/0028664, the contents of which is incorporated herein by reference in their entirety.

[1016] In some embodiments, the non-cationic lipid is oleic acid or a compound of Formula I, II, or IV of US2018/0028664, incorporated herein by reference in its entirety. The non-cationic lipid can comprise, for example, 0-30% (mol) of the total lipid present in the lipid nanoparticle. In some embodiments, the non-cationic lipid content is 5-20% (mol) or 10-15% (mol) of the total lipid present in the lipid nanoparticle. In embodiments, the molar ratio of ionizable lipid to the neutral lipid ranges from about 2:1 to about 8:1 (e.g., about 2:1, 3:1, 4:1, 5:1, 6:1, 7:1, or 8:1).

[1017] In some embodiments, the lipid nanoparticles do not comprise any phospholipids.

[1018] In some aspects, the lipid nanoparticle can further comprise a component, such as a sterol, to provide membrane integrity. One exemplary sterol that can be used in the lipid nanoparticle is cholesterol and derivatives thereof. Non-limiting examples of cholesterol derivatives include polar analogues such as 5a-choiestanol, 53-coprostanol, choiesteryl-(2′-hydroxy)-ethyl ether, choiesteryl-(4′-hydroxy)-butyl ether, and 6-ketocholestanol; non-polar analogues such as 5a-cholestane, cholestenone, 5a-cholestanone, 5p-cholestanone, and cholesteryl decanoate; and mixtures thereof. In some embodiments, the cholesterol derivative is a polar analogue, e.g., choiesteryl-(4′-hydroxy)-butyl ether. Exemplary cholesterol derivatives are described in PCT publication WO2009/127060 and US patent publication US2010/0130588, each of which is incorporated herein by reference in its entirety.

[1019] In some embodiments, the component providing membrane integrity, such as a sterol, can comprise 0-50% (mol) (e.g., 0-10%, 10-20%, 20-30%, 30-40%, or 40-50%) of the total lipid present in the lipid nanoparticle. In some embodiments, such a component is 20-50% (mol) 30-40% (mol) of the total lipid content of the lipid nanoparticle.

[1020] In some embodiments, the lipid nanoparticle can comprise a polyethylene glycol (PEG) or a conjugated lipid molecule. Generally, these are used to inhibit aggregation of lipid nanoparticles and/or provide steric stabilization. Exemplary conjugated lipids include, but are not limited to, PEG-lipid conjugates, polyoxazoline (POZ)-lipid conjugates, polyamide-lipid conjugates (such as ATTA-lipid conjugates), cationic-polymer lipid (CPL) conjugates, and mixtures thereof. In some embodiments, the conjugated lipid molecule is a PEG-lipid conjugate, for example, a (methoxy polyethylene glycol)-conjugated lipid.

[1021] Exemplary PEG-lipid conjugates include, but are not limited to, PEG-diacylglycerol (DAG) (such as 1-(monomethoxy-polyethyleneglycol)-2,3-dimyristoylglycerol (PEG-DMG)), PEG-dialkyloxypropyl (DAA), PEG-phospholipid, PEG-ceramide (Cer), a pegylated phosphatidylethanoloamine (PEG-PE), 1,2-dimyristoyl-sn-glycerol, methoxypoly ethylene glycol (DMG-PEG-2K), PEG succinate diacylglycerol (PEGS-DAG) (such as 4-0-(2′,3′-di(tetradecanoyloxy)propyl-l-0-(w-methoxy(polyethoxy)ethyl) butanedioate (PEG-S-DMG)), PEG dialkoxypropylcarbam, N-(carbonyl-methoxypolyethylene glycol 2000)-1,2-distearoyl-sn-glycero-3-phosphoethanolamine sodium salt, or a mixture thereof. Additional exemplary PEG-lipid conjugates are described, for example, in U.S. Pat. Nos. 5,885,613, 6,287,591, US2003/0077829, US2003/0077829, US2005/0175682, US2008/0020058, US2011/0117125, US2010/0130588, US2016/0376224, US2017/0119904, and US/099823, the contents of all of which are incorporated herein by reference in their entirety. In some embodiments, a PEG-lipid is a compound of Formula III, III-a-I, III-a-2, III-b-1, III-b-2, or V of US2018/0028664, the content of which is incorporated herein by reference in its entirety. In some embodiments, a PEG-lipid is of Formula II of US20150376115 or US2016/0376224, the content of both of which is incorporated herein by reference in its entirety. In some embodiments, the PEG-DAA conjugate can be, for example, PEG-dilauryloxypropyl, PEG-dimyristyloxypropyl, PEG-dipalmityloxypropyl, or PEG-distearyloxypropyl. The PEG-lipid can be one or more of PEG-DMG, PEG-dilaurylglycerol, PEG-dipalmitoylglycerol, PEG-disterylglycerol, PEG-dilaurylglycamide, PEG-dimyristylglycamide, PEG-dipalmitoylglycamide, PEG-disterylglycamide, PEG-cholesterol (1-[8′-(Cholest-5-en-3[beta]-oxy)carboxamido-3′,6′-dioxaoctanyl]carbamoyl-[omega]-methyl-poly(ethylene glycol), PEG-DMB (3,4-Ditetradecoxylbenzyl-[omega]-methyl-poly(ethylene glycol) ether), and 1,2-dimyristoyl-sn-glycero-3-phosphoethanolamine-N-[methoxy(polyethylene glycol)-2000]. In some embodiments, the PEG-lipid comprises PEG-DMG, 1,2-dimyristoyl-sn-glycero-3-phosphoethanolamine-N-[methoxy(polyethylene glycol)-2000]. In some embodiments, the PEG-lipid comprises a structure selected from:

[chemical structure]

[1022] In some embodiments, lipids conjugated with a molecule other than a PEG can also be used in place of PEG-lipid. For example, polyoxazoline (POZ)-lipid conjugates, polyamide-lipid conjugates (such as ATTA-lipid conjugates), and cationic-polymer lipid (GPL) conjugates can be used in place of or in addition to the PEG-lipid.

[1023] Exemplary conjugated lipids, i.e., PEG-lipids, (POZ)-lipid conjugates, ATTA-lipid conjugates and cationic polymer-lipids are described in the PCT and LIS patent applications listed in Table 2 of WO2019051289A9 and in WO2020106946A1, the contents of all of which are incorporated herein by reference in their entirety.

[1024] In some embodiments, an LNP comprises a compound of Formula (xix), a compound of Formula (xxi) and a compound of Formula (xxv). In some embodiments a LNP comprising a formulation of Formula (xix), Formula (xxi) and Formula (xxv) is used to deliver a gene modifying composition described herein to the cells, e.g., lung or pulmonary cells.

[1025] In some embodiments, the PEG or the conjugated lipid can comprise 0-20% (mol) of the total lipid present in the lipid nanoparticle. In some embodiments, PEG or the conjugated lipid content is 0.5-10% or 2-5% (mol) of the total lipid present in the lipid nanoparticle. Molar ratios of the ionizable lipid, non-cationic-lipid, sterol, and PEG/conjugated lipid can be varied as needed. For example, the lipid particle can comprise 30-70% ionizable lipid by mole or by total weight of the composition, 0-60% cholesterol by mole or by total weight of the composition, 0-30% non-cationic-lipid by mole or by total weight of the composition and 1-10% conjugated lipid by mole or by total weight of the composition. Preferably, the composition comprises 30-40% ionizable lipid by mole or by total weight of the composition, 40-50% cholesterol by mole or by total weight of the composition, and 10-20% non-cationic-lipid by mole or by total weight of the composition. In some other embodiments, the composition is 50-75% ionizable lipid by mole or by total weight of the composition, 20-40% cholesterol by mole or by total weight of the composition, and 5 to 10% non-cationic-lipid, by mole or by total weight of the composition and 1-10% conjugated lipid by mole or by total weight of the composition. The composition may contain 60-70% ionizable lipid by mole or by total weight of the composition, 25-35% cholesterol by mole or by total weight of the composition, and 5-10% non-cationic-lipid by mole or by total weight of the composition. The composition may also contain up to 90% ionizable lipid by mole or by total weight of the composition and 2 to 15% non-cationic lipid by mole or by total weight of the composition. The formulation may also be a lipid nanoparticle formulation, for example comprising 8-30% ionizable lipid by mole or by total weight of the composition, 5-30% non-cationic lipid by mole or by total weight of the composition, and 0-20% cholesterol by mole or by total weight of the composition; 4-25% ionizable lipid by mole or by total weight of the composition, 4-25% non-cationic lipid by mole or by total weight of the composition, 2 to 25% cholesterol by mole or by total weight of the composition, 10 to 35% conjugate lipid by mole or by total weight of the composition, and 5% cholesterol by mole or by total weight of the composition; or 2-30% ionizable lipid by mole or by total weight of the composition, 2-30% non-cationic lipid by mole or by total weight of the composition, 1 to 15% cholesterol by mole or by total weight of the composition, 2 to 35% conjugate lipid by mole or by total weight of the composition, and 1-20% cholesterol by mole or by total weight of the composition; or even up to 90% ionizable lipid by mole or by total weight of the composition and 2-10% non-cationic lipids by mole or by total weight of the composition, or even 100% cationic lipid by mole or by total weight of the composition. In some embodiments, the lipid particle formulation comprises ionizable lipid, phospholipid, cholesterol and a PEG-ylated lipid in a molar ratio of 50:10:38.5:1.5. In some other embodiments, the lipid particle formulation comprises ionizable lipid, cholesterol and a PEG-ylated lipid in a molar ratio of 60:38.5:1.5.

[1026] In some embodiments, the lipid particle comprises ionizable lipid, non-cationic lipid (e.g. phospholipid), a sterol (e.g., cholesterol) and a PEG-ylated lipid, where the molar ratio of lipids ranges from 20 to 70 mole percent for the ionizable lipid, with a target of 40-60, the mole percent of non-cationic lipid ranges from 0 to 30, with a target of 0 to 15, the mole percent of sterol ranges from 20 to 70, with a target of 30 to 50, and the mole percent of PEG-ylated lipid ranges from 1 to 6, with a target of 2 to 5.

[1027] In some embodiments, the lipid particle comprises ionizable lipid/non-cationic-lipid/sterol/conjugated lipid at a molar ratio of 50:10:38.5:1.5.

[1028] In an aspect, the disclosure provides a lipid nanoparticle formulation comprising phospholipids, lecithin, phosphatidylcholine and phosphatidylethanolamine.

[1029] In some embodiments, one or more additional compounds can also be included. Those compounds can be administered separately or the additional compounds can be included in the lipid nanoparticles of the invention. In other words, the lipid nanoparticles can contain other compounds in addition to the nucleic acid or at least a second nucleic acid, different than the first. Without limitations, other additional compounds can be selected from the group consisting of small or large organic or inorganic molecules, monosaccharides, disaccharides, trisaccharides, oligosaccharides, polysaccharides, peptides, proteins, peptide analogs and derivatives thereof, peptidomimetics, nucleic acids, nucleic acid analogs and derivatives, an extract made from biological materials, or any combinations thereof.

[1030] In some embodiments, a lipid nanoparticle (or a formulation comprising lipid nanoparticles) lacks reactive impurities (e.g., aldehydes or ketones), or comprises less than a preselected level of reactive impurities (e.g., aldehydes or ketones). While not wishing to be bound by theory, in some embodiments, a lipid reagent is used to make a lipid nanoparticle formulation, and the lipid reagent may comprise a contaminating reactive impurity (e.g., an aldehyde or ketone). A lipid regent may be selected for manufacturing based on having less than a preselected level of reactive impurities (e.g., aldehydes or ketones). Without wishing to be bound by theory, in some embodiments, aldehydes can cause modification and damage of RNA, e.g., cross-linking between bases and/or covalently conjugating lipid to RNA (e.g., forming lipid-RNA adducts). This may, in some instances, lead to failure of a reverse transcriptase reaction and/or incorporation of inappropriate bases, e.g., at the site(s) of lesion(s), e.g., a mutation in a newly synthesized target DNA.

[1031] In some embodiments, a lipid nanoparticle formulation is produced using a lipid reagent comprising less than 5%, 4%, 3%, 2%, 1%, 0.9%, 0.8%, 0.7%, 0.6%, 0.5%, 0.4%, 0.3%, 0.2%, or 0.1% total reactive impurity (e.g., aldehyde) content. In some embodiments, a lipid nanoparticle formulation is produced using a lipid reagent comprising less than 5%, 4%, 3%, 2%, 1%, 0.9%, 0.8%, 0.7%, 0.6%, 0.5%, 0.4%, 0.3%, 0.2%, or 0.1% of any single reactive impurity (e.g., aldehyde) species. In some embodiments, a lipid nanoparticle formulation is produced using a lipid reagent comprising: (i) less than 5%, 4%, 3%, 2%, 1%, 0.9%, 0.8%, 0.7%, 0.6%, 0.5%, 0.4%, 0.3%, 0.2%, or 0.1% total reactive impurity (e.g., aldehyde) content; and (ii) less than 5%, 4%, 3%, 2%, 1%, 0.9%, 0.8%, 0.7%, 0.6% 0.5%, 0.4%, 0.3%, 0.2%, or 0.1% of any single reactive impurity (e.g., aldehyde) species. In some embodiments, the lipid nanoparticle formulation is produced using a plurality of lipid reagents, and each lipid reagent of the plurality independently meets one or more criterion described in this paragraph. In some embodiments, each lipid reagent of the plurality meets the same criterion, e.g., a criterion of this paragraph.

[1032] In some embodiments, the lipid nanoparticle formulation comprises less than 5%, 4%, 3%, 2%, 1%, 0.9%, 0.8%, 0.7%, 0.6%, 0.5%, 0.4%, 0.3%, 0.2%, or 0.1% total reactive impurity (e.g., aldehyde) content. In some embodiments, the lipid nanoparticle formulation comprises less than 5%, 4%, 3%, 2%, 1%, 0.9%, 0.8%, 0.7%, 0.6%0, 0.5%, 0.4%, 0.3%, 0.2%, or 0.1% of any single reactive impurity (e.g., aldehyde) species. In some embodiments, the lipid nanoparticle formulation comprises: (i) less than 5%, 4%, 3%, 2%, 1%, 0.9%, 0.8%, 0.7%, 0.6%, 0.5%, 0.4%, 0.3%, 0.2%, or 0.1% total reactive impurity (e.g., aldehyde) content; and (ii) less than 5%, 4%, 3%, 2%, 1%, 0.9%, 0.8%, 0.7%, 0.6%, 0.5%, 0.4%, 0.3%, 0.2%, or 0.1% of any single reactive impurity (e.g., aldehyde) species.

[1033] In some embodiments, one or more, or optionally all, of the lipid reagents used for a lipid nanoparticle as described herein or a formulation thereof comprise less than 5%, 4%, 3%, 2%, 1%, 0.9%, 0.8%, 0.7%, 0.6%, 0.5%, 0.4%, 0.3%, 0.2%, or 0.1% total reactive impurity (e.g., aldehyde) content. In some embodiments, one or more, or optionally all, of the lipid reagents used for a lipid nanoparticle as described herein or a formulation thereof comprise less than 5%, 4%, 3%, 2%, 1%, 0.9%, 0.8%, 0.7%, 0.6%, 0.5%, 0.4%, 0.3%, 0.2%, or 0.1% of any single reactive impurity (e.g., aldehyde) species. In some embodiments, one or more, or optionally all, of the lipid reagents used for a lipid nanoparticle as described herein or a formulation thereof comprise: (i) less than 5%, 4%, 3%, 2%, 1%, 0.9%, 0.8%, 0.7%, 0.6%, 0.5%, 0.4%, 0.3%, 0.2%, or 0.1% total reactive impurity (e.g., aldehyde) content; and (ii) less than 5%, 4%, 3%, 2%, 1%, 0.9%, 0.8%, 0.7%, 0.6%, 0.5%, 0.4%, 0.3%, 0.2%, or 0.1% of any single reactive impurity (e.g., aldehyde) species.

[1034] In some embodiments, total aldehyde content and/or quantity of any single reactive impurity (e.g., aldehyde) species is determined by liquid chromatography (LC), e.g., coupled with tandem mass spectrometry (MS/MS), e.g., according to the method described in Example 34. In some embodiments, reactive impurity (e.g., aldehyde) content and/or quantity of reactive impurity (e.g., aldehyde) species is determined by detecting one or more chemical modifications of a nucleic acid molecule (e.g., an RNA molecule, e.g., as described herein) associated with the presence of reactive impurities (e.g., aldehydes), e.g., in the lipid reagents. In some embodiments, reactive impurity (e.g., aldehyde) content and/or quantity of reactive impurity (e.g., aldehyde) species is determined by detecting one or more chemical modifications of a nucleotide or nucleoside (e.g., a ribonucleotide or ribonucleoside, e.g., comprised in or isolated from a template nucleic acid, e.g., as described herein) associated with the presence of reactive impurities (e.g., aldehydes), e.g., in the lipid reagents. In embodiments, chemical modifications of a nucleic acid molecule, nucleotide, or nucleoside are detected by determining the presence of one or more modified nucleotides or nucleosides, e.g., using LC-MS/MS analysis.

[1035] In some embodiments, a nucleic acid (e.g., RNA) described herein (e.g., a template nucleic acid or a nucleic acid encoding a gene modifying polypeptide) does not comprise an aldehyde modification, or comprises less than a preselected amount of aldehyde modifications. In some embodiments, on average, a nucleic acid has less than 50, 20, 10, 5, 2, or 1 aldehyde modifications per 1000 nucleotides, e.g., wherein a single cross-linking of two nucleotides is a single aldehyde modification. In some embodiments, the aldehyde modification is an RNA adduct (e.g., a lipid-RNA adduct). In some embodiments, the aldehyde-modified nucleotide is cross-linking between bases. In some embodiments, a nucleic acid (e.g., RNA) described herein comprises less than 50, 20, 10, 5, 2, or 1 cross-links between nucleotides.

[1036] In some embodiments, LNPs are directed to specific tissues by the addition of targeting domains. For example, biological ligands may be displayed on the surface of LNPs to enhance interaction with cells displaying cognate receptors, thus driving association with and cargo delivery to tissues wherein cells express the receptor. In some embodiments, the biological ligand may be a ligand that drives delivery to the liver, e.g., LNPs that display GalNAc result in delivery of nucleic acid cargo to hepatocytes that display asialoglycoprotein receptor (ASGPR). The work of Akinc et al. Mol Ther 18(7):1357-1364 (2010) teaches the conjugation of a trivalent GalNAc ligand to a PEG-lipid (GalNAc-PEG-DSG) to yield LNPs dependent on ASGPR for observable LNP cargo effect (see, e.g., FIG. 6). Other ligand-displaying LNP formulations, e.g., incorporating folate, transferrin, or antibodies, are discussed in WO2017223135, which is incorporated herein by reference in its entirety, in addition to the references used therein, namely Kolhatkar et al., Curr Drug Discov Technol. 2011 8:197-206; Musacchio and Torchilin, Front Biosci. 2011 16:1388-1412; Yu et al., Mol Membr Biol. 2010 27:286-298; Patil et al., Crit Rev Ther Drug Carrier Syst. 2008 25:1-61; Benoit et al., Biomacromolecules. 2011 12:2708-2714; Zhao et al., Expert Opin Drug Deliv. 2008 5:309-319; Akinc et al., Mol Ther. 2010 18:1357-1364; Srinivasan et al., Methods Mol Biol. 2012 820:105-116; Ben-Arie et al., Methods Mol Biol. 2012 757:497-507; Peer 2010 J Control Release. 20:63-68; Peer et al., Proc Natl Acad Sci USA. 2007 104:4095-4100; Kim et al., Methods Mol Biol. 2011 721:339-353; Subramanya et al., Mol Ther. 2010 18:2028-2037; Song et al., Nat Biotechnol. 2005 23:709-717; Peer et al., Science. 2008 319:627-630; and Peer and Lieberman, Gene Ther. 2011 18:1127-1133.

[1037] In some embodiments, LNPs are selected for tissue-specific activity by the addition of a Selective ORgan Targeting (SORT) molecule to a formulation comprising traditional components, such as ionizable cationic lipids, amphipathic phospholipids, cholesterol and poly(ethylene glycol) (PEG) lipids. The teachings of Cheng et al. Nat Nanotechnol 15(4):313-320 (2020) demonstrate that the addition of a supplemental “SORT” component precisely alters the in vivo RNA delivery profile and mediates tissue-specific (e.g., lungs, liver, spleen) gene delivery and editing as a function of the percentage and biophysical property of the SORT molecule.

[1038] In some embodiments, the LNPs comprise biodegradable, ionizable lipids. In some embodiments, the LNPs comprise (9Z,12Z)-3-((4,4-bis(octyloxy)butanoyl)oxy)-2-((((3-(diethylamino)propoxy)carbonyl)oxy)methyl)propyl octadeca-9,12-dienoate, also called 3-((4,4-bis(octyloxy)butanoyl)oxy)-2-((((3-(diethylamino)propoxy)carbonyl)oxy)methyl)propyl (9Z,12Z)-octadeca-9,12-dienoate) or another ionizable lipid. See, e.g., lipids of WO2019/067992, WO/2017/173054, WO2015/095340, and WO2014/136086, as well as references provided therein. In some embodiments, the term cationic and ionizable in the context of LNP lipids is interchangeable, e.g., wherein ionizable lipids are cationic depending on the pH.

[1039] In some embodiments, multiple components of a gene modifying system may be prepared as a single LNP formulation, e.g., an LNP formulation comprises mRNA encoding for the gene modifying polypeptide and an RNA template. Ratios of nucleic acid components may be varied in order to maximize the properties of a therapeutic. In some embodiments, the ratio of RNA template to mRNA encoding a gene modifying polypeptide is about 1:1 to 100:1, e.g., about 1:1 to 20:1, about 20:1 to 40:1, about 40:1 to 60:1, about 60:1 to 80:1, or about 80:1 to 100:1, by molar ratio. In other embodiments, a system of multiple nucleic acids may be prepared by separate formulations, e.g., one LNP formulation comprising a template RNA and a second LNP formulation comprising an mRNA encoding a gene modifying polypeptide. In some embodiments, the system may comprise more than two nucleic acid components formulated into LNPs. In some embodiments, the system may comprise a protein, e.g., a gene modifying polypeptide, and a template RNA formulated into at least one LNP formulation.

[1040] In some embodiments, the average LNP diameter of the LNP formulation may be between 10s of nm and 100s of nm, e.g., measured by dynamic light scattering (DLS). In some embodiments, the average LNP diameter of the LNP formulation may be from about 40 nm to about 150 nm, such as about 40 nm, 45 nm, 50 nm, 55 nm, 60 nm, 65 nm, 70 nm, 75 nm, 80 nm, 85 nm, 90 nm, 95 nm, 100 nm, 105 nm, 110 nm, 115 nm, 120 nm, 125 nm, 130 nm, 135 nm, 140 nm, 145 nm, or 150 nm. In some embodiments, the average LNP diameter of the LNP formulation may be from about 50 nm to about 100 nm, from about 50 nm to about 90 nm, from about 50 nm to about 80 nm, from about 50 nm to about 70 nm, from about 50 nm to about 60 nm, from about 60 nm to about 100 nm, from about 60 nm to about 90 nm, from about 60 nm to about 80 nm, from about 60 nm to about 70 nm, from about 70 nm to about 100 nm, from about 70 nm to about 90 nm, from about 70 nm to about 80 nm, from about 80 nm to about 100 nm, from about 80 nm to about 90 nm, or from about 90 nm to about 100 nm. In some embodiments, the average LNP diameter of the LNP formulation may be from about 70 nm to about 100 nm. In a particular embodiment, the average LNP diameter of the LNP formulation may be about 80 nm. In some embodiments, the average LNP diameter of the LNP formulation may be about 100 nm. In some embodiments, the average LNP diameter of the LNP formulation ranges from about 1 mm to about 500 mm, from about 5 mm to about 200 mm, from about 10 mm to about 100 mm, from about 20 mm to about 80 mm, from about 25 mm to about 60 mm, from about 30 mm to about 55 mm, from about 35 mm to about 50 mm, or from about 38 mm to about 42 mm.

[1041] A LNP may, in some instances, be relatively homogenous. A polydispersity index may be used to indicate the homogeneity of a LNP, e.g., the particle size distribution of the lipid nanoparticles. A small (e.g., less than 0.3) polydispersity index generally indicates a narrow particle size distribution. A LNP may have a polydispersity index from about 0 to about 0.25, such as 0.01, 0.02, 0.03, 0.04, 0.05, 0.06, 0.07, 0.08, 0.09, 0.10, 0.11, 0.12, 0.13, 0.14, 0.15, 0.16, 0.17, 0.18, 0.19, 0.20, 0.21, 0.22, 0.23, 0.24, or 0.25. In some embodiments, the polydispersity index of a LNP may be from about 0.10 to about 0.20.

[1042] The zeta potential of a LNP may be used to indicate the electrokinetic potential of the composition. In some embodiments, the zeta potential may describe the surface charge of a LNP. Lipid nanoparticles with relatively low charges, positive or negative, are generally desirable, as more highly charged species may interact undesirably with cells, tissues, and other elements in the body. In some embodiments, the zeta potential of a LNP may be from about −10 mV to about +20 mV, from about −10 mV to about +15 mV, from about −10 mV to about +10 mV, from about −10 mV to about +5 mV, from about −10 mV to about 0 mV, from about −10 mV to about −5 mV, from about −5 mV to about +20 mV, from about −5 mV to about +15 mV, from about −5 mV to about +10 mV, from about −5 mV to about +5 mV, from about −5 mV to about 0 mV, from about 0 mV to about +20 mV, from about 0 mV to about +15 mV, from about 0 mV to about +10 mV, from about 0 mV to about +5 mV, from about +5 mV to about +20 mV, from about +5 mV to about +15 mV, or from about +5 mV to about +10 mV.

[1043] The efficiency of encapsulation of a protein and/or nucleic acid, e.g., gene modifying polypeptide or mRNA encoding the polypeptide, describes the amount of protein and/or nucleic acid that is encapsulated or otherwise associated with a LNP after preparation, relative to the initial amount provided. The encapsulation efficiency is desirably high (e.g., close to 100%). The encapsulation efficiency may be measured, for example, by comparing the amount of protein or nucleic acid in a solution containing the lipid nanoparticle before and after breaking up the lipid nanoparticle with one or more organic solvents or detergents. An anion exchange resin may be used to measure the amount of free protein or nucleic acid (e.g., RNA) in a solution. Fluorescence may be used to measure the amount of free protein and/or nucleic acid (e.g., RNA) in a solution. For the lipid nanoparticles described herein, the encapsulation efficiency of a protein and/or nucleic acid may be at least 50%, for example 50%, 55%, 60%, 65%, 70%, 75%, 80%, 85%, 90%, 91%, 92%, 93%, 94%, 95%, 96%, 97%, 98%, 99%, or 100%. In some embodiments, the encapsulation efficiency may be at least 80%. In some embodiments, the encapsulation efficiency may be at least 90%. In some embodiments, the encapsulation efficiency may be at least 95%.

[1044] A LNP may optionally comprise one or more coatings. In some embodiments, a LNP may be formulated in a capsule, film, or table having a coating. A capsule, film, or tablet including a composition described herein may have any useful size, tensile strength, hardness or density.

[1045] Additional exemplary lipids, formulations, methods, and characterization of LNPs are taught by WO2020061457, which is incorporated herein by reference in its entirety.

[1046] In some embodiments, in vitro or ex vivo cell lipofections are performed using Lipofectamine MessengerMax (Thermo Fisher) or TransIT-mRNA Transfection Reagent (Mirus Bio). In certain embodiments, LNPs are formulated using the GenVoy_ILM ionizable lipid mix (Precision NanoSystems). In certain embodiments, LNPs are formulated using 2,2-dilinoleyl-4-dimethylaminoethyl-[1,3]-dioxolane (DLin-KC2-DMA) or dilinoleylmethyl-4-dimethylaminobutyrate (DLin-MC3-DMA or MC3), the formulation and in vivo use of which are taught in Jayaraman et al. Angew Chem Int Ed Engl 51(34):8529-8533 (2012), incorporated herein by reference in its entirety.

[1047] Additional specific LNP formulations useful for delivery of nucleic acids are described in U.S. Pat. Nos. 8,158,601 and 8,168,775, both incorporated by reference, which include formulations used in patisiran, sold under the name ONPATTRO.

[1048] Exemplary dosing of gene modifying composition LNP may include about 0.1, 0.25, 0.3, 0.5, 1, 2, 3, 4, 5, 6, 8, 10, or 100 mg/kg (RNA). Exemplary dosing of AAV comprising a nucleic acid encoding one or more components of the system may include an MOI of about 10¹¹, 10¹², 10¹³, and 10¹⁴ vg/kg.

[1049] Provided herein are, for example, LNP compositions comprising a gene modifying system, described herein. In some embodiments, the gene modifying polypeptide and template RNA are encapsulated within the same LNP. In some embodiments, the gene modifying polypeptide and template RNA are encapsulated in different LNPs.

### Plant-Modification Methods

[1050] Gene modifying systems described herein may be used to modify a plant or a plant part (e.g., leaves, roots, flowers, fruits, or seeds), e.g., to increase the fitness of a plant.

### A. Delivery to a Plant

[1051] Provided herein are methods of delivering a gene modifying system described herein to a plant. Included are methods for delivering a gene modifying system to a plant by contacting the plant, or part thereof, with a gene modifying system. The methods are useful for modifying the plant to, e.g., increase the fitness of a plant.

[1052] More specifically, in some embodiments, a nucleic acid described herein (e.g., a nucleic acid encoding a gene modifying polypeptide) may be encoded in a vector, e.g., inserted adjacent to a plant promoter, e.g., a maize ubiquitin promoter (ZmUBI) in a plant vector (e.g., pHUC411). In some embodiments, the nucleic acids described herein are introduced into a plant (e.g., japonica rice) or part of a plant (e.g., a callus of a plant) via agrobacteria. In some embodiments, the systems and methods described herein can be used in plants by replacing a plant gene (e.g., hygromycin phosphotransferase (HPT)) with a null allele (e.g., containing a base substitution at the start codon). Systems and methods for modifying a plant genome are described in Xu et. al. Development of plant prime-editing systems for precise genome editing, 2020, Plant Communications.

[1053] In one aspect, provided herein is a method of increasing the fitness of a plant, the method including delivering to the plant the gene modifying system described herein (e.g., in an effective amount and duration) to increase the fitness of the plant relative to an untreated plant (e.g., a plant that has not been delivered the gene modifying system).

[1054] An increase in the fitness of the plant as a consequence of delivery of a gene modifying system can manifest in a number of ways, e.g., thereby resulting in a better production of the plant, for example, an improved yield, improved vigor of the plant or quality of the harvested product from the plant, an improvement in pre- or post-harvest traits deemed desirable for agriculture or horticulture (e.g., taste, appearance, shelf life), or for an improvement of traits that otherwise benefit humans (e.g., decreased allergen production). An improved yield of a plant relates to an increase in the yield of a product (e.g., as measured by plant biomass, grain, seed or fruit yield, protein content, carbohydrate or oil content or leaf area) of the plant by a measurable amount over the yield of the same product of the plant produced under the same conditions, but without the application of the instant compositions or compared with application of conventional plant-modifying agents. For example, yield can be increased by at least about 0.5%, about 1%, about 2%, about 3%, about 4%, about 5%, about 10%, about 20%, about 30%, about 40%, about 50%, about 60%, about 70%, about 80%, about 90%, about 100%, or more than 100%. In some instances, the method is effective to increase yield by about 2x-fold, 5x-fold, 10x-fold, 25x-fold, 50x-fold, 75x-fold, 100x-fold, or more than 100x-fold relative to an untreated plant. Yield can be expressed in terms of an amount by weight or volume of the plant or a product of the plant on some basis. The basis can be expressed in terms of time, growing area, weight of plants produced, or amount of a raw material used. For example, such methods may increase the yield of plant tissues including, but not limited to: seeds, fruits, kernels, bolls, tubers, roots, and leaves.

[1055] An increase in the fitness of a plant as a consequence of delivery of a gene modifying system can also be measured by other means, such as an increase or improvement of the vigor rating, the stand (the number of plants per unit of area), plant height, stalk circumference, stalk length, leaf number, leaf size, plant canopy, visual appearance (such as greener leaf color), root rating, emergence, protein content, increased tillering, bigger leaves, more leaves, less dead basal leaves, stronger tillers, less fertilizer needed, less seeds needed, more productive tillers, earlier flowering, early grain or seed maturity, less plant verse (lodging), increased shoot growth, earlier germination, or any combination of these factors, by a measurable or noticeable amount over the same factor of the plant produced under the same conditions, but without the administration of the instant compositions or with application of conventional plant-modifying agents. Accordingly, provided herein is a method of modifying a plant, the method including delivering to the plant an effective amount of any of the gene modifying systems provided herein, wherein the method modifies the plant and thereby introduces or increases a beneficial trait in the plant (e.g., by about 1%, 2%, 5%, 10%, 20%, 30%, 40%, 50%, 60%, 70%, 80%, 90%, 100%, or more than 100%) relative to an untreated plant. In particular, the method may increase the fitness of the plant (e.g., by about 1%, 2%, 5%, 10%, 20%, 30%, 40%, 50%, 60%, 70%, 80%, 90%, 100%, or more than 100%) relative to an untreated plant.

[1056] In some instances, the increase in plant fitness is an increase (e.g., by about 1%, 2%, 5%, 10%, 20%, 30%, 40%, 50%, 60%, 70%, 80%, 90%, 100%, or more than 100%) in disease resistance, drought tolerance, heat tolerance, cold tolerance, salt tolerance, metal tolerance, herbicide tolerance, chemical tolerance, water use efficiency, nitrogen utilization, resistance to nitrogen stress, nitrogen fixation, pest resistance, herbivore resistance, pathogen resistance, yield, yield under water-limited conditions, vigor, growth, photosynthetic capability, nutrition, protein content, carbohydrate content, oil content, biomass, shoot length, root length, root architecture, seed weight, or amount of harvestable produce.

[1057] In some instances, the increase in fitness is an increase (e.g., by about 1%, 2%, 5%, 10%, 20%, 30%, 40%, 50%, 60%, 70%, 80%, 90%, 100%, or more than 100%) in development, growth, yield, resistance to abiotic stressors, or resistance to biotic stressors. An abiotic stress refers to an environmental stress condition that a plant or a plant part is subjected to that includes, e.g., drought stress, salt stress, heat stress, cold stress, and low nutrient stress. A biotic stress refers to an environmental stress condition that a plant or plant part is subjected to that includes, e.g. nematode stress, insect herbivory stress, fungal pathogen stress, bacterial pathogen stress, or viral pathogen stress. The stress may be temporary, e.g. several hours, several days, several months, or permanent, e.g. for the life of the plant.

[1058] In some instances, the increase in plant fitness is an increase (e.g., by about 1%, 2%, 5%, 10%, 20%, 30%, 40%, 50%, 60%, 70%, 80%, 90%, 100%, or more than 100%) in quality of products harvested from the plant. For example, the increase in plant fitness may be an improvement in commercially favorable features (e.g., taste or appearance) of a product harvested from the plant. In other instances, the increase in plant fitness is an increase in shelf-life of a product harvested from the plant (e.g., by about 1%, 2%, 5%, 10%, 20%, 30%, 40%, 50%, 60%, 70%, 80%, 90%, 100%, or more than 100%).

[1059] Alternatively, the increase in fitness may be an alteration of a trait that is beneficial to human or animal health, such as a reduction in allergen production. For example, the increase in fitness may be a decrease (e.g., by about 1%, 2%, 5%, 10%, 20%, 30%, 40%, 50%, 60%, 70%, 80%, 90%, 100%, or more than 100%) in production of an allergen (e.g., pollen) that stimulates an immune response in an animal (e.g., human).

[1060] The modification of the plant (e.g., increase in fitness) may arise from modification of one or more plant parts. For example, the plant can be modified by contacting leaf, seed, pollen, root, fruit, shoot, flower, cells, protoplasts, or tissue (e.g., meristematic tissue) of the plant. As such, in another aspect, provided herein is a method of increasing the fitness of a plant, the method including contacting pollen of the plant with an effective amount of any of the plant-modifying compositions herein, wherein the method increases the fitness of the plant (e.g., by about 1%, 2%, 5%, 10%, 20%, 30%, 40%, 50%, 60%, 70%, 80%, 90%, 100%, or more than 100%) relative to an untreated plant.

[1061] In yet another aspect, provided herein is a method of increasing the fitness of a plant, the method including contacting a seed of the plant with an effective amount of any of the gene modifying systems disclosed herein, wherein the method increases the fitness of the plant (e.g., by about 1%, 2%, 5%, 10%, 20%, 30%, 40%, 50%, 60%, 70%, 80%, 90%, 100%, or more than 100%) relative to an untreated plant.

[1062] In another aspect, provided herein is a method including contacting a protoplast of the plant with an effective amount of any of the gene modifying systems described herein, wherein the method increases the fitness of the plant (e.g., by about 1%, 2%, 5%, 10%, 20%, 30%, 40%, 50%, 60%, 70%, 80%, 90%, 100%, or more than 100%) relative to an untreated plant.

[1063] In a further aspect, provided herein is a method of increasing the fitness of a plant, the method including contacting a plant cell of the plant with an effective amount of any of the gene modifying system described herein, wherein the method increases the fitness of the plant (e.g., by about 1%, 2%, 5%, 10%, 20% 30%, 40%, 50%, 60%, 70%, 80%, 90%, 100%, or more than 100%) relative to an untreated plant.

[1064] In another aspect, provided herein is a method of increasing the fitness of a plant, the method including contacting meristematic tissue of the plant with an effective amount of any of the plant-modifying compositions herein, wherein the method increases the fitness of the plant (e.g., by about 1%, 2%, 5%, 10%, 20%, 30%, 40%, 50%, 60%, 70%, 80%, 90%, 100%, or more than 100%) relative to an untreated plant.

[1065] In another aspect, provided herein is a method of increasing the fitness of a plant, the method including contacting an embryo of the plant with an effective amount of any of the plant-modifying compositions herein, wherein the method increases the fitness of the plant (e.g., by about 1%, 2%, 5%, 10%, 20%, 30%, 40%, 50%, 60%, 70%, 80%, 90%, 100%, or more than 100%) relative to an untreated plant.

### B. Application Methods

[1066] A plant described herein can be exposed to any of the gene modifying system compositions described herein in any suitable manner that permits delivering or administering the composition to the plant. The gene modifying system may be delivered either alone or in combination with other active (e.g., fertilizing agents) or inactive substances and may be applied by, for example, spraying, injection (e.g,. microinjection), through plants, pouring, dipping, in the form of concentrated liquids, gels, solutions, suspensions, sprays, powders, pellets, briquettes, bricks and the like, formulated to deliver an effective concentration of the plant-modifying composition. Amounts and locations for application of the compositions described herein are generally determined by the habitat of the plant, the lifecycle stage at which the plant can be targeted by the plant-modifying composition, the site where the application is to be made, and the physical and functional characteristics of the plant-modifying composition.

[1067] In some instances, the composition is sprayed directly onto a plant, e.g., crops, by e.g., backpack spraying, aerial spraying, crop spraying/dusting etc. In instances where the gene modifying system is delivered to a plant, the plant receiving the gene modifying system may be at any stage of plant growth. For example, formulated plant-modifying compositions can be applied as a seed coating or root treatment in early stages of plant growth or as a total plant treatment at later stages of the crop cycle. In some instances, the plant-modifying composition may be applied as a topical agent to a plant.

[1068] Further, the gene modifying system may be applied (e.g., in the soil in which a plant grows, or in the water that is used to water the plant) as a systemic agent that is absorbed and distributed through the tissues of a plant. In some instances, plants or food organisms may be genetically transformed to express the gene modifying system.

[1069] Delayed or continuous release can also be accomplished by coating the gene modifying system or a composition with the plant-modifying composition(s) with a dissolvable or bioerodable coating layer, such as gelatin, which coating dissolves or erodes in the environment of use, to then make the plant-modifying gene modifying system position available, or by dispersing the agent in a dissolvable or erodable matrix. Such continuous release and/or dispensing means devices may be advantageously employed to consistently maintain an effective concentration of one or more of the plant-modifying compositions described herein.

[1070] In some instances, the gene modifying system is delivered to a part of the plant, e.g., a leaf, seed, pollen, root, fruit, shoot, or flower, or a tissue, cell, or protoplast thereof. In some instances, the gene modifying system is delivered to a cell of the plant. In some instances, the gene modifying system is delivered to a protoplast of the plant. In some instances, the gene modifying system is delivered to a tissue of the plant. For example, the composition may be delivered to meristematic tissue of the plant (e.g., apical meristem, lateral meristem, or intercalary meristem). In some instances, the composition is delivered to permanent tissue of the plant (e.g., simple tissues (e.g., parenchyma, collenchyma, or sclerenchyma) or complex permanent tissue (e.g., xylem or phloem)). In some instances, the gene modifying system is delivered to a plant embryo.

### C. Plants

[1071] A variety of plants can be delivered to or treated with a gene modifying system described herein. Plants that can be delivered a gene modifying system (i.e., “treated”) in accordance with the present methods include whole plants and parts thereof, including, but not limited to, shoot vegetative organs/structures (e.g., leaves, stems and tubers), roots, flowers and floral organs/structures (e.g., bracts, sepals, petals, stamens, carpels, anthers and ovules), seed (including embryo, endosperm, cotyledons, and seed coat) and fruit (the mature ovary), plant tissue (e.g., vascular tissue, ground tissue, and the like) and cells (e.g., guard cells, egg cells, and the like), and progeny of same. Plant parts can further refer parts of the plant such as the shoot, root, stem, seeds, stipules, leaves, petals, flowers, ovules, bracts, branches, petioles, internodes, bark, pubescence, tillers, rhizomes, fronds, blades, pollen, stamen, and the like. The class of plants that can be treated in a method disclosed herein includes the class of higher and lower plants, including angiosperms (monocotyledonous and dicotyledonous plants), gymnosperms, ferns, horsetails, psilophytes, lycophytes, bryophytes, and algae (e.g., multicellular or unicellular algae). Plants that can be treated in accordance with the present methods further include any vascular plant, for example monocotyledons or dicotyledons or gymnosperms, including, but not limited to alfalfa, apple, Arabidopsis, banana, barley, canola, castor bean, chrysanthemum, clover, cocoa, coffee, cotton, cottonseed, corn, crambe, cranberry, cucumber, dendrobium, dioscorea, eucalyptus, fescue, flax, gladiolus, liliacea, linseed, millet, muskmelon, mustard, oat, oil palm, oilseed rape, papaya, peanut, pineapple, ornamental plants, Phaseolus, potato, rapeseed, rice, rye, ryegrass, safflower, sesame, sorghum, soybean, sugarbeet, sugarcane, sunflower, strawberry, tobacco, tomato, turfgrass, wheat and vegetable crops such as lettuce, celery, broccoli, cauliflower, cucurbits; fruit and nut trees, such as apple, pear, peach, orange, grapefruit, lemon, lime, almond, pecan, walnut, hazel; vines, such as grapes (e.g., a vineyard), kiwi, hops; fruit shrubs and brambles, such as raspberry, blackberry, gooseberry; forest trees, such as ash, pine, fir, maple, oak, chestnut, popular; with alfalfa, canola, castor bean, corn, cotton, crambe, flax, linseed, mustard, oil palm, oilseed rape, peanut, potato, rice, safflower, sesame, soybean, sugarbeet, sunflower, tobacco, tomato, and wheat. Plants that can be treated in accordance with the methods of the present invention include any crop plant, for example, forage crop, oilseed crop, grain crop, fruit crop, vegetable crop, fiber crop, spice crop, nut crop, turf crop, sugar crop, beverage crop, and forest crop. In certain instances, the crop plant that is treated in the method is a soybean plant. In other certain instances, the crop plant is wheat. In certain instances, the crop plant is corn. In certain instances, the crop plant is cotton. In certain instances, the crop plant is alfalfa. In certain instances, the crop plant is sugarbeet. In certain instances, the crop plant is rice. In certain instances, the crop plant is potato. In certain instances, the crop plant is tomato.

[1072] In certain instances, the plant is a crop. Examples of such crop plants include, but are not limited to, monocotyledonous and dicotyledonous plants including, but not limited to, fodder or forage legumes, ornamental plants, food crops, trees, or shrubs selected from Acer spp., Allium spp., Amaranthus spp., Ananas comosus, Apium graveolens, Arachis spp, Asparagus officinalis, Beta vulgaris, Brassica spp. (e.g., Brassica napus, Brassica rapa ssp. (canola, oilseed rape, turnip rape), Camellia sinensis, Canna indica, Cannabis saliva, Capsicum spp., Castanea spp., Cichorium endivia, Citrullus lanatus, Citrus spp., Cocos spp., Coffea spp., Coriandrum sativum, Corylus spp., Crataegus spp., Cucurbita spp., Cucumis spp., Daucus carota, Fagus spp., Ficus carica, Fragaria spp., Ginkgo biloba, Glycine spp. (e.g., Glycine max, Soja hispida or Soja max), Gossypium hirsutum, Helianthus spp. (e.g., Helianthus annuus), Hibiscus spp., Hordeum spp. (e.g., Hordeum vulgare), Ipomoea batatas, Juglans spp., Lactuca sativa, Linum usitatissimum, Litchi chinensis, Lotus spp., Luffa acutangula, Lupinus spp., Lycopersicon spp. (e.g., Lycopersicon esculenturn, Lycopersicon lycopersicum, Lycopersicon pyriforme), Malus spp., Medicago sativa, Mentha spp., Miscanthus sinensis, Morus nigra, Musa spp., Nicotiana spp., Olea spp., Oryza spp. (e.g., Oryza sativa, Oryza latifolia), Panicum miliaceum, Panicum virgatum, Passiflora edulis, Petroselinum crispum, Phaseolus spp., Pinus spp., Pistacia vera, Pisum spp., Poa spp., Populus spp., Prunus spp., Pyrus communis, Quercus spp., Raphanus sativus, Rheum rhabarbarum, Ribes spp., Ricinus communis, Rubus spp., Saccharum spp., Salix sp., Sambucus spp., Secale cereale, Sesamum spp., Sinapis spp., Solanum spp. (e.g., Solanum tuberosum, Solanum integrifolium or Solanum lycopersicum), Sorghum bicolor, Sorghum halepense, Spinacia spp., Tamarindus indica, Theobroma cacao, Trifolium spp., Triticosecale rimpaui, Triticum spp. (e.g., Triticum aestivum, Triticum durum, Triticum turgidum, Triticum hybernum, Triticum macha, Triticum sativum or Triticum vulgare), Vaccinium spp., Vicia spp., Vigna spp., Viola odorata, Vitis spp., and Zea mays. In certain embodiments, the crop plant is rice, oilseed rape, canola, soybean, corn (maize), cotton, sugarcane, alfalfa, sorghum, or wheat. The plant or plant part for use in the present invention include plants of any stage of plant development. In certain instances, the delivery can occur during the stages of germination, seedling growth, vegetative growth, and reproductive growth. In certain instances, delivery to the plant occurs during vegetative and reproductive growth stages. In some instances, the composition is delivered to pollen of the plant. In some instances, the composition is delivered to a seed of the plant. In some instances, the composition is delivered to a protoplast of the plant. In some instances, the composition is delivered to a tissue of the plant. For example, the composition may be delivered to meristematic tissue of the plant (e.g., apical meristem, lateral meristem, or intercalary meristem). In some instances, the composition is delivered to permanent tissue of the plant (e.g., simple tissues (e.g., parenchyma, collenchyma, or sclerenchyma) or complex permanent tissue (e.g., xylem or phloem)). In some instances, the composition is delivered to a plant embryo. In some instances, the composition is delivered to a plant cell. The stages of vegetative and reproductive growth are also referred to herein as “adult” or “mature” plants.

[1073] In instances where the gene modifying system is delivered to a plant part, the plant part may be modified by the plant-modifying agent. Alternatively, the gene modifying system may be distributed to other parts of the plant (e.g., by the plant's circulatory system) that are subsequently modified by the plant-modifying agent.

[1074] All publications, patent applications, patents, and other publications and references (e.g., sequence database reference numbers) cited herein are incorporated by reference in their entirety. For example, all GenBank, Unigene, and Entrez sequences referred to herein, e.g., in any Table herein, are incorporated by reference. Unless otherwise specified, the sequences specified herein (e.g., by gene name in RepBase or by accession number), including in any Table herein, refer to the database entries current as of Apr. 28, 2022. When one gene or protein references a plurality of sequence accession numbers, all of the sequence variants are encompassed.

### EXAMPLES

[1075] The invention is further illustrated by the following examples. The examples are provided for illustrative purposes only and are not to be construed as limiting the scope or content of the invention in any way.

### Example 1: Retrotransposon-Based Gene Modifying Systems Yield a Different Integration Profile than a Lentiviral System

[1076] This example characterizes the integration profile resulting from use of a gene modifying system described herein, and contrasts it to the integration profile resulting from use of a lentiviral system.

[1077] The first gene modifying system used in this Example comprises a nucleic acid encoding a Vingi-1_Acar gene modifying polypeptide (or driver) having a nucleic acid sequence of:

(SEQ ID NO: 900)
ATGGACGAGTACCAGCGCTCCTTGTCCCGCCCCCTGTTGACAATCATGAGTATTAAT
ATCGAAGGCTTGAGCCTCGCGAAAGAGGAACTGCTTGCCAAGATGTCCGAGGACAT
CAGCTGCGACATTCTGTGCATCCAAGAGACCCATCGCGACATCACCATGCGTCGCCC
CAAGATCCTCGGTATGCAGCTTGCGGTGGAGCGCCCTCACCGCCAGTACGGCTCCGC
GATTTTCGTGCGTTCCGGTGTGGCCATTTCTGCTACCAGCCTCACCGAGGTTAACAAT
ATTGAGATCCTGTCAGTGGAGCTCGATTCCTGTACCGTCTCCAGTCTGTACAAACCT
CCCGGTGCAGACTTCTACTTTACTCCCCCGACGTCTTGCCACAACCATGAGGCTCAT
TTTGTGGTTGGTGATTTCAATTCCCACTCCTGCGTGTGGGGCTATGACGAGGATGAC
CGCAACGGCGAAGCTGTTCTGACCTGGGCCGATAATTCCCGCATGTCCCTGCTCCAC
GATAGTAAGCTGCCTCCCTCCTTCAACAGTGGGAGATGGAAGCGCGGGTACAACCC
TGATCTTATCTTCGTCAAAGAATCCATCTCTCATCAGTGTACCAAGCGCGTCCTCAAC
CCGATTCCTAACACTCAGCACCGCCCCATTTGTTGCGTAGCATATGCTGCCGTGCGT
CCCAAGTCTGTCCCCTTCAGAAGGAGATACAACTTCAACAAGGCTAACTGGACCAA
GTTTACCGAAACCTTGGAAGCGGCAATCTCCGACATTGAGCCATCTATCGAGAATTA
TGATCTCTTCGTTGAGGCAGTCAAGCGGTCCTCTCGCCTGAGTATCCCCCGTGGATG
TAGGACCTCCTACCTGCCCGGCCTGAACGAAGAGTCACTCAATCAGCTGCAGGAAT
ACCTGCGCCTGTTCCAAGAGAATCCTTACTCCGATGGCACCATCGCTGCCGGACAAA
AACTGAGCACCGCTCTGGCGAATGCTAAGAAAGACCGCTGGATCGAGCTGCTCGAG
AACCTGGACATGTCCAAGTCTAGCCGGAAAGCTTGGCAGCTCCTGCGCCGGCTGGA
CAGCGACCCCCTCGTGAATCCTGGCCATGCCAATGTAACGCCGGACCAGATCGCCC
ATCAACTGATCCAGAACGGCAAGACCAATTGCAGTAGAATCAAGATGAAGATCAAC
AGAGTACCCGAGTTGGAAACACACCAGCTGTCTAGTCCTCTCAACCTCAAAGAGCTC
CGCGAAGCAATCAAAAGGTGTAAGACGGGCAAAGCTCCCGGTCTGGATGACCTGAT
GATGGAACAGATCAAACACTTGGGGGCCAAGGCTGAGAACTGGTTGCTGAAATTCT
ACAACCAGTGCCTGGCTCACAAGCAGATCCCCCGTGCGTGGCGCAAGACTAAGATT
ATCGCCATCTTGAAGCCGGGCAAGGATGCTAGTAACGCCCGCAACTACCGTCCTATT
TCCCTCCTGTGTCACCTTTACAAGGTGTACGAGCGCATGCTCCTGAACCGCTTGGGC
CCCGTCATCGAGCCTAAACTGATCGCCCAACAGGCTGGTTTCCGCCCAGGTAAGAAC
TGCACTGGACAGATCCTGCACCTTACGGAGCACATCGAGGAAGGTTACGAGAAGGG
CTGCATCACCGGAACCGTCTTCGTGGACCTGACTGCGGCCTACGACACGGTTCAGCA
CAGAAAAATGCTCCACAAGGTATATCATATTACCCGGGATTTCGACTTCACCAAAAC
AGTGCAGACGCTTCTGGAGAATCGCTCCTTTTACGTCGAGTTCCAGGGTCAGAAAAG
TCGGTGGAGGCGCCAGAAGAACGGCTTGCCCCAGGGTAGCGTGCTCGCCCCAACCC
TGTTTAATATCTTCACCAACGACCAGCCACAGCCCCCGCTGACAAAATCCTTTATCT
ATGCCGACGATCTTGGCCTGACCACGCAAGCCAAGGACTTTGAGACAGTCGAGAAA
CAGCTCACAAACGCACTCAAGGACCTGAGTTCCTATTACAAGGAGAACCATCTCAA
ACCTAACCCCGCTAAGACACAGGTCTGCGCTTTTCACCTGAGGAATCGGGAGGCCA
ACCGTAAACTGAAGGTGACATGGGAGGGACAGGAACTGGAGCACTGTTTCCACCCC
AAGTATTTGGGCGTGACTCTCGATCGCACCCTTACGTATCGGAAGCACTGCATGAAC
ACTAAGCATAAGGTGGCGGCCAGAAATAACATCCTGCGTAAACTCACAGGAAGCGC
CTGGGGCGCCGACCCACAGGTCATCCGTACCAGTGCTCTGGCCCTGTCTTTCTCCAC
TGCTGAATATGCGTGTCCGGTGTGGCACAAGTCCGCCCACGCGAAGCAGGTGGATA
TTGCCCTGAACGAGACATGCCGGATTATCACTGGTTGCCTCAAGCCTACCCCCGTCG
ACAAGCTCTATAAGTTGGCCGGCATTGCACCCCCTGATGTCCGTCGCGAAGTCGCAG
CCAATGGCGAGCGGAAAAAGGTAGAACACTGCGAATCACATCCGCTGCATGGATAT
CATCCCCCTCCCACCCGGCTTAAGAGCCGTAAGGGCTTCATGCGCACAACCACTCCG
CTGGATGTGCCTCCCGCTGCCGCGCGCGTGAGTCTGTGGGCCGCTAAGCCCGGTAAT
TCCAATTGGATGGCACCGCAAGAGGGCCTCCCGCCCGGAGCCAATCAAGAGTGGGC
CACATGGAAGTCCTTGAACAGGCTGCGCTCCGGTGTGGGACGCTCTAAGGACAACC
TGGCCCGTTGGCACTATCTGGAAGAGTCATCCACCCTGTGCGACTGTGGTGCTGAAC
AGACTACCCAGCACATGTACGCTTGCCCCCAATGCCCTGCCTCCTGCACGGAAGAGG
AACTCTTTAAGGCAACCGATAACGCAGTGGCAGTGGCGCGCTTTTGGAGTAAGACA
ATC

The Vingi driver encoded by the nucleic acid has an amino acid sequence of:

(SEQ ID NO: 405)
MDEYQRSLSRPLLTIMSINIEGLSLAKEELLAKMSEDISCDILCIQETHRDITMRRPKILGM
QLAVERPHRQYGSAIFVRSGVAISATSLTEVNNIEILSVELDSCTVSSLYKPPGADFYFTPP
TSCHNHEAHFVVGDFNSHSCVWGYDEDDRNGEAVLTWADNSRMSLLHDSKLPPSFNS
GRWKRGYNPDLIFVKESISHQCTKRVLNPIPNTQHRPICCVAYAAVRPKSVPFRRRYNFN
KANWTKFTETLEAAISDIEPSIENYDLFVEAVKRSSRLSIPRGCRTSYLPGLNEESLNQLQ
EYLRLFQENPYSDGTIAAGQKLSTALANAKKDRWIELLENLDMSKSSRKAWQLLRRLD
SDPLVNPGHANVTPDQIAHQLIQNGKTNCSRIKMKINRVPELETHQLSSPLNLKELREAIK
RCKTGKAPGLDDLMMEQIKHLGAKAENWLLKFYNQCLAHKQIPRAWRKTKIIAILKPG
KDASNARNYRPISLLCHLYKVYERMLLNRLGPVIEPKLIAQQAGFRPGKNCTGQILHLTE
HIEEGYEKGCITGTVFVDLTAAYDTVQHRKMLHKVYHITRDFDFTKTVQTLLENRSFYV
EFQGQKSRWRRQKNGLPQGSVLAPTLFNIFTNDQPQPPLTKSFIYADDLGLTTQAKDFET
VEKQLTNALKDLSSYYKENHLKPNPAKTQVCAFHLRNREANRKLKVTWEGQELEHCF
HPKYLGVTLDRTLTYRKHCMNTKHKVAARNNILRKLTGSAWGADPQVIRTSALALSFS
TAEYACPVWHKSAHAKQVDIALNETCRIITGCLKPTPVDKLYKLAGIAPPDVRREVAAN
GERKKVEHCESHPLHGYHPPPTRLKSRKGFMRTTTPLDVPPAAARVSLWAAKPGNSNW
MAPQEGLPPGANQEWATWKSLNRLRSGVGRSKDNLARWHYLEESSTLCDCGAEQTTQ
HMYACPQCPASCTEEELFKATDNAVAVARFWSKTI

The Vingi-1_Acar gene modifying system further comprises a template RNA having a sequence of:

(SEQ ID NO: 1000)
AGGGGGACACGGAAAGAGCCTCCCCGAAGATTGAGTGAATTCAGTCGGGCGTCCCC
TGGGCAACGTTTCTTGTAAGCGGCCGATCTTTCCACCCCAAAAGCATTGGATGAGTT
TACGGATCCGAATTCTCGACGGATCGATCCGAACAAACGACCCAACACCCGTGCGT
TTTATTCTGTCTTTTTATTGCCGATCCCCCGGCCGCTTTACTTGTACAGCTCGTCCATG
CCGAGAGTGATCCCGGCGGCGGTCACGAACTCCAGCAGGACCATGTGATCGCGCTT
CTCGTTGGGGTCTTTGCTCAGGGCGGACTGGGTGCTCAGGTAGTGGTTGTCGGGCAG
CAGCACGGGGCCGTCGCCGATGGGGGTGTTCTGCTGGTAGTGGTCGGCGAGCTGCA
CGCTGCCGTCCTCGATGTTGTGGCGGATCTTGAAGTTCACCTTGATGCCGTTCTTCTG
CTTGTCGGCCATGATATAGACGTTGTGGCTGTTGTAGTTGTACTCCAGCTTGTGCCCC
AGGATGTTGCCGTCCTCCTTGAAGTCGATGCCCTTCAGCTCGATGCGGTTCACCAGG
GTGTCGCCCTCGAACTTCACCTCGGCGCGGGTCTTGTAGTTGCCGTCGTCCTTGAAG
AAGATGGTGCGCTCCTGGACGTAGCCTTCGGGCATGGCGGACTTGAAGAAGTCGTG
CTGCTTCATGTGGTCGGGGTAGCGGCTGAAGCACTGCACGCCGTAGGTCAGGGTGGT
CACGAGGGTGGGCCAGGGCACGGGCAGCTTGCCGGTGGTGCAGATGAACTTCAGGG
TCAGCTTGCCGTAGGTGGCATCGCCCTCGCCCTCGCCGGACACGCTGAACTTGTGGC
CGTTTACGTCGCCGTCCAGCTCGACCAGGATGGGCACCACCCCGGTGAACAGCTCCT
CGCCCTTGCTCACCATGGTGGCTTTACCAACAGTACCGGAATGCCAAGCTTGGGTCC
TGTGTTCTGGCGGCAAACCCGTTGCGAAAAAGAACGTTCACGGCGACTACTGCACTT
ATATACGGTTCTCCCCCACCCTCGGGAAAAAGGCGGAGCCAGTACACGACATCACT
TTCCCAGTTTACCCCGCGCCACCTTCTCTAGGCACCGGATCAATTGCCGACCCCTCCC
CCCAACTTCTCGGGGACTGTGGGCGATGTGCGCTCTGCCCTAGTTGCTTGTGATTTCT
TTTCTTTTTTATTTTATTTCCATTATTTGAAATGTATTTGTTGTAGCAATGCTTTTGAC
ACGAAATAAATAAAAGAAAAAAAAAAAAAAAAAAAAAAAAAAAAAAAAAAAAAA
AAAAAAAAAAAAAAAAAAAAAAAAAAAAAAAAAAAAAAAAAA

[1078] Briefly, the template RNA for use with the Vingi-1_Acar gene modifying system comprises the following sequences from 5′ to 3′: 5′UTR, GFP, EF1alpha, 3′UTR and was co-delivered with the driver RNA.

[1079] The second gene modifying system used in this Example comprises a CR-1-1_PH driver encoded by a nucleic acid having a sequence of:

(SEQ ID NO: 905)
atgctgtataccatcttcctcgtttatgggatcctgtgttttttctttgtgtatttctgcatctacctgtacatcactgtttatctttgttttctgttc
tttctgtttctgcttctgtgcggtgacgtggaaagcaatcctggaccaggcagagcccgtggatgtcggttgctgtattgcaacatccgcggtctgcat
gctaatctggccgagctggactttgttagtcgcggggtggacgtggtctgctgttccgagactctggtggctgggcgtcgccacgatgccgag
ttggccctcgctggcttccagtccccctttcgtaggctctgtggctcaggccctggcttccgtggcatggcggtgtacgtcaggtctgggttct
gtgcctaccggcagagtgtgcacgaatgtgcctgccacgagattatcgtcgttcgcgtgtgtggacgtctgaacaattactatctgttctctctc
taccgctccccggccaccgatgactccctttacgattgccttctgactgccatggccagcatccagtccactgatccgaaggcagcettegtc
ttcgttggcgacgtaaacgcacatcaccgggactggctgggaagcgcctctccaacagattgtcacggcgtcgccgctctggacttttgcac
cctttccagctgcgtgcaactcgtccgtgggtccactcatatcgctggaaactgtctggatctggtgatgaccgacgtgcctgacctgatgac
cgtgaccgtcggatccccgattggaagtagcgaccactcccacctggtggtctcactggatctcaaccaggtcgtgcctgttgtggatacac
gcagggttgtgttcgtgAAAagccgcgccaactgggtcgccatcactcgcgctgtgaggactctgccttggcggcagattatccactcc
gaggaccctgtaagtgagctcaatgacctgaccgtgtctattctggaacgctttgttcccaagcgcaccatcctcgtgagaagccgcgataa
gccttggttcgatgaccagtgtagactggctttcgaggctaagcaggcggcttaccgtgcttggcgtaggagtcgggaccgcacgttgtgg
cagacctatgtggacaggcgggccgaggccaagcgcgtgtatgaagaggctcagaggcgccttcgccagaggagccgtgaaagcctg
ctcagtattgaccaccctcatcgctggtggtcagagctcaagggctccgtgtteggegccgaacccagcctgccccctctcgttggtcctgg
cggtggaatcattaccgatcccctcgccagggccgagctgctctccgcacattttgatggaaagcagtcacgegatgtcategccttgcccc
acggttgccacccggagccccgcctcacatctctggccttcaggtccggcgctatcaaggtcctcctggaaggactcgacccctacggtgg
cgttgaccccgtcggcatgtttcctctgttttacaagcagctggcggacgtcctggccccaaagttggccgttatctttcgtcggctgatccgc
ctcggcaactttccccgctgctggcgcactggtaatatcactcccatccccaagggccccgtgagtccttacgtggccaattaccgtcccatc
accttgacacctatcctgtctaaggttttcgaaaagctgatcgcaggcaagctgggtcgctttgctgaagtcactggcttgctccctgctggtc
agtttgcttatcgcatcggtctgggctgctgtgacgctctcctgtccgtgagccatcacctgcagtccgccctggactgccgctccgaagccc
gcctggtgcagctcgatttctccgcagcgtttgaccgcgttaatcacaggggtcttctgtataaattggagtccttcggcgtcgggggccggg
tgctgtcaattatccgtgatttcgtatccgagcgcacccagtctgtatccgtggacggtgttctgtccgccagcgtcggcgtggttagcggagt
cccccagggtagcgtgctgggacctctgctctttgtattgtatacgtccgacatgttctctagcctggagaataccctcattaactatgcagatg
actccactttgatggcagttattccggccccacgcctgcgtgacgccgtagcgcagtccctgaatagggacctgtcacgcatcagtgcctgg
tgttcagcttggtccatgaagctgaacgcgtccaagaccaaaagcatgattatctcaaggtccaggactttggtgcctcaacacccccagctg
gagatcgacgatactttgctgcaggagtcctcatccctggaaatcctgggcgtcgtgttcgatgagaagctcaccttcgagcctcacatcag
gcggctggtgagccgcgcgtctaccaagatcgggctgctccgcaaggtgaactccgtgttcggcgattcccaggtcgcgaggcgttgcttt
tacgctttcctgctccctgtgctggagtactgctctccggtatgggcgagtgccgcggatacccatcttcgtcttctggaccgccttgtctccag
cgccagccgtttgtgtgctgacaacgatctggtgaacctgagtcaccgtcggcgcgtggctgagctgtgtatgttctacaaggtgtacaataa
cgagaggcattggctgtactcatccctgccagccctgaaggtcttcgggcgcgaaacgcgtgccgcgtgcggtgctcactcttttacgttgg
aggcggttcgctgtcgcaccaaccagttctgccgctgctttgtgccttggtctgcgaaggtgtggaacctgctccctgcctccgctttcggga
gaatcggtctgcaggcatttaaaagcgctgtgaacggtttcctgttggactttctg

[1080] The CR-1 driver encoded by the nucleic acid has an amino acid sequence of:

(SEQ ID NO: 406)
MLYTIFLVYGILCFFFVYFCIYLYITVYLCFLFFLFLLLCGDVESNPGPGRARGCRLLYCNI
RGLHANLAELDFVSRGVDVVCCSETLVAGRRHDAELALAGFQSPFRRLCGSGPGFRGM
AVYVRSGFCAYRQSVHECACHEIIVVRVCGRLNNYYLFSLYRSPATDDSLYDCLLTAM
ASIQSTDPKAAFVFVGDVNAHHRDWLGSASPTDCHGVAALDFCTLSSCVQLVRGSTHIA
GNCLDLVMTDVPDLMTVTVGSPIGSSDHSHLVVSLDLNQVVPVVDTRRVVFVKSRAN
WVAITRAVRTLPWRQIIHSEDPVSELNDLTVSILERFVPKRTILVRSRDKPWFDDQCRLA
FEAKQAAYRAWRRSRDRTLWQTYVDRRAEAKRVYEEAQRRLRQRSRESLLSIDHPHR
WWSELKGSVFGAEPSLPPLVGPGGGIITDPLARAELLSAHFDGKQSRDVIALPHGCHPEP
RLTSLAFRSGAIKVLLEGLDPYGGVDPVGMFPLFYKQLADVLAPKLAVIFRRLIRLGNFP
RCWRTGNITPIPKGPVSPYVANYRPITLTPILSKVFEKLIAGKLGRFAEVTGLLPAGQFAY
RIGLGCCDALLSVSHHLQSALDCRSEARLVQLDFSAAFDRVNHRGLLYKLESFGVGGRV
LSIIRDFVSERTQSVSVDGVLSASVGVVSGVPQGSVLGPLLFVLYTSDMFSSLENTLINYA
DDSTLMAVIPAPRLRDAVAQSLNRDLSRISAWCSAWSMKLNASKTKSMIISRSRTLVPQ
HPQLEIDDTLLQESSSLEILGVVFDEKLTFEPHIRRLVSRASTKIGLLRKVNSVFGDSQVA
RRCFYAFLLPVLEYCSPVWASAADTHLRLLDRLVSSASRLCADNDLVNLSHRRRVAELC
MFYKVYNNERHWLYSSLPALKVFGRETRAACGAHSFTLEAVRCRTNQFCRCFVPWSA
KVWNLLPASAFGRIGLQAFKSAVNGFLLDFL

The CR-1 gene modifying system further comprises a plasmid that produces a template RNA having a sequence of:

(SEQ ID NO: 1005)
TCTATGGCTTCTGAGGCGGAAAGAACCAGCTGGGGCTCTAGGGGGTATCCCCCTGTG
GAATGTGTGTCAGTTAGGGTGTGGAAAGTCCCCAGGCTCCCCAGCAGGCAGAAGTA
TGCAAAGCATGCATCTCAATTAGTCAGCAACCAGGTGTGGAAAGTCCCCAGGCTCC
CCAGCAGGCAGAAGTATGCAAAGCATGCATCTCAATTAGTCAGCAACCATAGTCCC
GCCCCTAACTCCGCCCATCCCGCCCCTAACTCCGCCCAGTTCCGCCCATTCTCCGCCC
CATGGCTGACTAATTTTTTTTATTTATGCAGAGGCCGAGGCCGCCTCTGCCTCTGAGC
TATTCCAGAAGTAGTGAGGAGGCTTTTTTGGAGGCCTAGGCTTTTGCAAAAAGCTCC
CGGGAGCTTGTATATCCATTTTCGGATCTGATCAAGAGACAGGATGAGGATCGTTTC
GCATGACCGAGTACAAGCCCACGGTGCGCCTCGCCACCCGCGACGACGTCCCCAGG
GCCGTACGCACCCTCGCCGCCGCGTTCGCCGACTACCCCGCCACGCGCCACACCGTC
GATCCGGACCGCCACATCGAGCGGGTCACCGAGCTGCAAGAACTCTTCCTCACGCG
CGTCGGGCTCGACATCGGCAAGGTGTGGGTCGCGGACGACGGCGCCGCGGTGGCGG
TCTGGACCACGCCGGAGAGCGTCGAAGCGGGGGCGGTGTTCGCCGAGATCGGCCCG
CGCATGGCCGAGTTGAGCGGTTCCCGGCTGGCCGCGCAGCAACAGATGGAGGGCCT
CCTGGCGCCGCACCGGCCCAAGGAGCCCGCGTGGTTCCTGGCCACCGTCGGCGTCTC
GCCCGACCACCAGGGCAAGGGTCTGGGCAGCGCCGTCGTGCTCCCCGGAGTGGAGG
CCGCCGAGCGCGCCGGGGTGCCCGCCTTCCTGGAGACCTCCGCGCCCCGCAACCTCC
CCTTCTACGAGCGGCTCGGCTTCACCGTCACCGCCGACGTCGAGGTGCCCGAAGGAC
CGCGCACCTGGTGCATGACCCGCAAGCCCGGTGCCTAGGCGGGACTCTGGGGTTCG
AAATGACCGACCAAGCGACGCCCAACCTGCCATCACGAGATTTCGATTCCACCGCC
GCCTTCTATGAAAGGTTGGGCTTCGGAATCGTTTTCCGGGACGCCGGCTGGATGATC
CTCCAGCGCGGGGATCTCATGCTGGAGTTCTTCGCCCACCCCAACTTGTTTATTGCA
GCTTATAATGGTTACAAATAAAGCAATAGCATCACAAATTTCACAAATAAAGCATTT
TTTTCACTGCATTCTAGTTGTGGTTTGTCCAAACTCATCAATGTATCTTATCATGTCT
GTATACCGTCGACCTCTAGCTAGAGCTTGGCGTAATCATGGTCATAGCTGTTTCCTGT
GTGAAATTGTTATCCGCTCACAATTCCACACAACATACGAGCCGGAAGCATAAAGT
GTAAAGCCTGGGGTGCCTAATGAGTGAGCTAACTCACATTAATTGCGTTGCGCTCAC
TGCCCGCTTTCCAGTCGGGAAACCTGTCGTGCCAGCTGCATTAATGAATCGGCCAAC
GCGCGGGGAGAGGCGGTTTGCGTATTGGGCGCTCTTCCGCTTCCTCGCTCACTGACT
CGCTGCGCTCGGTCGTTCGGCTGCGGCGAGCGGTATCAGCTCACTCAAAGGCGGTA
ATACGGTTATCCACAGAATCAGGGGATAACGCAGGAAAGAACATGTGAGCAAAAG
GCCAGCAAAAGGCCAGGAACCGTAAAAAGGCCGCGTTGCTGGCGTTTTTCCATAGG
CTCCGCCCCCCTGACGAGCATCACAAAAATCGACGCTCAAGTCAGAGGTGGCGAAA
CCCGACAGGACTATAAAGATACCAGGCGTTTCCCCCTGGAAGCTCCCTCGTGCGCTC
TCCTGTTCCGACCCTGCCGCTTACCGGATACCTGTCCGCCTTTCTCCCTTCGGGAAGC
GTGGCGCTTTCTCATAGCTCACGCTGTAGGTATCTCAGTTCGGTGTAGGTCGTTCGCT
CCAAGCTGGGCTGTGTGCACGAACCCCCCGTTCAGCCCGACCGCTGCGCCTTATCCG
GTAACTATCGTCTTGAGTCCAACCCGGTAAGACACGACTTATCGCCACTGGCAGCAG
CCACTGGTAACAGGATTAGCAGAGCGAGGTATGTAGGCGGTGCTACAGAGTTCTTG
AAGTGGTGGCCTAACTACGGCTACACTAGAAGAACAGTATTTGGTATCTGCGCTCTG
CTGAAGCCAGTTACCTTCGGAAAAAGAGTTGGTAGCTCTTGATCCGGCAAACAAAC
CACCGCTGGTAGCGGTTTTTTTGTTTGCAAGCAGCAGATTACGCGCAGAAAAAAAGG
ATCTCAAGAAGATCCTTTGATCTTTTCTACGGGGTCTGACGCTCAGTGGAACGAAAA
CTCACGTTAAGGGATTTTGGTCATGAGATTATCAAAAAGGATCTTCACCTAGATCCT
TTTAAATTAAAAATGAAGTTTTAAATCAATCTAAAGTATATATGAGTAAACTTGGTC
TGACAGTTACCAATGCTTAATCAGTGAGGCACCTATCTCAGCGATCTGTCTATTTCGT
TCATCCATAGTTGCCTGACTCCCCGTCGTGTAGATAACTACGATACGGGAGGGCTTA
CCATCTGGCCCCAGTGCTGCAATGATACCGCGAGACCCACGCTCACCGGCTCCAGAT
TTATCAGCAATAAACCAGCCAGCCGGAAGGGCCGAGCGCAGAAGTGGTCCTGCAAC
TTTATCCGCCTCCATCCAGTCTATTAATTGTTGCCGGGAAGCTAGAGTAAGTAGTTC
GCCAGTTAATAGTTTGCGCAACGTTGTTGCCATTGCTACAGGCATCGTGGTGTCACG
CTCGTCGTTTGGTATGGCTTCATTCAGCTCCGGTTCCCAACGATCAAGGCGAGTTAC
ATGATCCCCCATGTTGTGCAAAAAAGCGGTTAGCTCCTTCGGTCCTCCGATCGTTGT
CAGAAGTAAGTTGGCCGCAGTGTTATCACTCATGGTTATGGCAGCACTGCATAATTC
TCTTACTGTCATGCCATCCGTAAGATGCTTTTCTGTGACTGGTGAGTACTCAACCAAG
TCATTCTGAGAATAGTGTATGCGGCGACCGAGTTGCTCTTGCCCGGCGTCAATACGG
GATAATACCGCGCCACATAGCAGAACTTTAAAAGTGCTCATCATTGGAAAACGTTCT
TCGGGGCGAAAACTCTCAAGGATCTTACCGCTGTTGAGATCCAGTTCGATGTAACCC
ACTCGTGCACCCAACTGATCTTCAGCATCTTTTACTTTCACCAGCGTTTCTGGGTGAG
CAAAAACAGGAAGGCAAAATGCCGCAAAAAAGGGAATAAGGGCGACACGGAAATG
TTGAATACTCATACTCTTCCTTTTTCAATATTATTGAAGCATTTATCAGGGTTATTGT
CTCATGAGCGGATACATATTTGAATGTATTTAGAAAAATAAACAAATAGGGGTTCCG
CGCACATTTCCCCGAAAAGTGCCACCTGACGTCGACGGATCGGGAGATCTCCCGATC
CCCTATGGTGCACTCTCAGTACAATCTGCTCTGATGCCGCATAGTTAAGCCAGTATC
TGCTCCCTGCTTGTGTGTTGGAGGTCGCTGAGTAGTGCGCGAGCAAAATTTAAGCTA
CAACAAGGCAAGGCTTGACCGACAATTGCATGAAGAATCTGCTTAGGGTTAGGCGT
TTTGCGCTGCTTCGCGATGTACGGGCCAGATATACGCgttgacattgattattgactagttattaatagtaat
caattacggggtcattagttcatagcccatatatggagttccgcgttacataacttacggtaaatggcccgcctggctgaccgcccaacgacc
cccgcccattgacgtcaataatgacgtatgttcccatagtaacgccaatagggactttccattgacgtcaatgggtggagtatttacggtaaac
tgcccacttggcagtacatcaagtgtatcatatgccaagtacgccccctattgacgtcaatgacggtaaatggcccgcctggcattatgccca
gtacatgaccttatgggactttcctacttggcagtacatctacgtattagtcatcgctattaccatggtgatgcggttttggcagtacatcaatgg
gcgtggatagcggtttgactcacggggatttccaagtctccaccccattgacgtcaatgggagtttgttttggcaccaaaatcaacgggacttt
ccaaaatgtcgtaacaactccgccccattgacgcaaatgggcggtaggcgtgtacggtgggaggtctatataagcagagctctctggctaa
ctagagaacccactgcttactggcttatcgaaattaatacgactcactatagggagacccaagctggcgtggcctgcgcgttatcaggccgc
ccccattgtccggccaccggacgcctctttgtttgtatgagctggctttgggtttggggctctgggtagcccctgagttggaggaaatgccact
ctaaaggcggatgagacctcttttggtccaacggcatccctgagaggagatgaacaggctggtgccatagctgggtactcagtcttccgca
gtctgctcctctctctcttccatcaggtagtaccacctgatgctcttttcctttcctttctcttcttcttcttttcggccaaagcctgtactggtgatggc
agggtctggggcgcgtagatagctggccgctttcgtagctatcgttactgtcgatttgtttttgctttattGTTTACGGATCCGAAT
TCTCGACGGATCGATCCGAACAAACGACCCAACACCCGTGCGTTTTATTCTGTCTTTT
TATTGCCGATCCCCCGGCCGCTTTACTTGTACAGCTCGTCCATGCCGAGAGTGATCC
CGGCGGCGGTCACGAACTCCAGCAGGACCATGTGATCGCGCTTCTCGTTGGGGTCTT
TGCTCAGGGCGGACTGGGTGCTCAGGTAGTGGTTGTCGGGCAGCAGCACGGGGCCG
TCGCCGATGGGGGTGTTCTGCTGGTAGTGGTCGGCGAGCTGCACGCTGCCGTCCTCG
ATGTTGTGGCGGATCTTGAAGTTCACCTTGATGCCGTTCTTCTGCTTGTCGGCCATGA
TATAGACGTTGTGGCTGTTGTAGTTGTACTCCAGCTTGTGCCCCAGGATGTTGCCGTC
CTCCTTGAAGTCGATGCCCTTCAGCTCGATGCGGTTCACCAGGGTGTCGCCCTCGAA
CTTCACCTCGGCGCGGGTCTTGTAGTTGCCGTCGTCCTTGAAGAAGATGGTGCGCTC
CTGGACGTAGCCTTCGGGCATGGCGGACTTGAAGAAGTCGTGCTGCTTCATGTGGTC
GGGGTAGCGGCTGAAGCACTGCACGCCGTAGGTCAGGGTGGTCACGAGGGTGGGCC
AGGGCACGGGCAGCTTGCCGGTGGTGCAGATGAACTTCAGGGTCAGCTTGCCGTAG
GTGGCATCGCCCTCGCCCTCGCCGGACACGCTGAACTTGTGGCCGTTTACGTCGCCG
TCCAGCTCGACCAGGATGGGCACCACCCCGGTGAACAGCTCCTCGCCCTTGCTCACC
ATGGTGGCTTTACCAACAGTACCGGAATGCCAAGCTTGGGTCctgtgttctggeggcaaacccgtt
gcgaaaaagaacgttcacggcgactactgcacttatatacggttctcccccaccctcgggaaaaaggcggagccagtacacgacatcactt
tcccagtttacccegcgccaccttctctaggcaceggatcaattgccgacccctccccccaacttcteggggactgtgggcgatgtgcgctct
gccctagcagcgttttgggcttcccggtgttgcaagatgcttcatttgggttgtattacctgtccgtgggagctcaagcgtgaagttttaataata
ataataaCCGCTGATCAGCCTCGACTGTGCCTTCTAGTTGCCAGCCATCTGTTGTTTGCCC
CTCCCCCGTGCCTTCCTTGACCCTGGAAGGTGCCACTCCCACTGTCCTTTCCTAATAA
AATGAGGAAATTGCATCGCATTGTCTGAGTAGGTGTCATTCTATTCTGGGGGGTGGG
GTGGGGCAGGACAGCAAGGGGGAGGATTGGGAAGACAATAGCAGGCATGCTGGGG
ATGCGGTGGGC

[1081] The gene modifying system was introduced as RNA into iPSC using Neon transfection system.

[1082] As a comparison, integration profile data for lentiviral gene delivery system was obtained from the following publication, Sherrill-Mix et al. 2013, Retrovirology.

[1083] Integration profile was assessed using S-EPTS/LM-PCR (shearing extension primer tag selection ligation-mediated PCR) (Schmidt et al., 2001) and analyzed using the GENE-IS tool suite (Afzal, Wilkening, et al., 2017). All insertion sites were located on the human genome assembly GRCh38 and were categorized in relation to gene annotations found in Gencode (gencodegenes.org) version 39. Site were classified as exonic and intronic if located within region boundaries, upstream of TSS if located within 2 kb upstream of annotated transcription start site, and intergenic if found in any region not annotated as a protein coding gene. See FIGS. 2A-2B.

[1084] The analysis showed the following proportions of insertion sites from the Vingi-1_Acar, CR-1-1_PH, and lentivirus systems:

| Insertion site | Vingi-1_Acar | CR-1-1_PH | Lentirvirus |
|---|---|---|---|
| Exonic | 5% | 4% | 6% |
| Intronic | 47% | 46% | 72% |
| Upstream of TSS | 6% | 6% | 11% |
| Intergenic | 43% | 45% | 17% |

[1085] Overall, this analysis showed that the gene modifying systems tested demonstrated a higher level of insertions outside of genes compared to a lentiviral system. Without wishing to be bound by theory, the integration pattern of the gene modifying systems is advantageous because, in some embodiments, it is desired to reduce disrupting expression of endogenous genes in the host cell.

### Example 2: Retrotransposon-Based Gene Modifying Systems do not Activate DNA Damage Response Pathways in Primary Cells

[1086] This example demonstrates that editing of a genome using a gene modifying system described herein does not activate the DNA damage response in primary cells.

[1087] The gene modifying systems used in this Example comprise a nucleic acid encoding a Vingi-1_Acar, CR1-1_PH, RTE-1_MD, and RTE-3_BF drivers as described herein. For Vingi-1_Acar, the gene modifying system comprises a nucleic acid sequence of:

(SEQ ID NO: 900)
ATGGACGAGTACCAGCGCTCCTTGTCCCGCCCCCTGTTGACAATCATGAGTATTAAT
ATCGAAGGCTTGAGCCTCGCGAAAGAGGAACTGCTTGCCAAGATGTCCGAGGACAT
CAGCTGCGACATTCTGTGCATCCAAGAGACCCATCGCGACATCACCATGCGTCGCCC
CAAGATCCTCGGTATGCAGCTTGCGGTGGAGCGCCCTCACCGCCAGTACGGCTCCGC
GATTTTCGTGCGTTCCGGTGTGGCCATTTCTGCTACCAGCCTCACCGAGGTTAACAAT
ATTGAGATCCTGTCAGTGGAGCTCGATTCCTGTACCGTCTCCAGTCTGTACAAACCT
CCCGGTGCAGACTTCTACTTTACTCCCCCGACGTCTTGCCACAACCATGAGGCTCAT
TTTGTGGTTGGTGATTTCAATTCCCACTCCTGCGTGTGGGGCTATGACGAGGATGAC
CGCAACGGCGAAGCTGTTCTGACCTGGGCCGATAATTCCCGCATGTCCCTGCTCCAC
GATAGTAAGCTGCCTCCCTCCTTCAACAGTGGGAGATGGAAGCGCGGGTACAACCC
TGATCTTATCTTCGTCAAAGAATCCATCTCTCATCAGTGTACCAAGCGCGTCCTCAAC
CCGATTCCTAACACTCAGCACCGCCCCATTTGTTGCGTAGCATATGCTGCCGTGCGT
CCCAAGTCTGTCCCCTTCAGAAGGAGATACAACTTCAACAAGGCTAACTGGACCAA
GTTTACCGAAACCTTGGAAGCGGCAATCTCCGACATTGAGCCATCTATCGAGAATTA
TGATCTCTTCGTTGAGGCAGTCAAGCGGTCCTCTCGCCTGAGTATCCCCCGTGGATG
TAGGACCTCCTACCTGCCCGGCCTGAACGAAGAGTCACTCAATCAGCTGCAGGAAT
ACCTGCGCCTGTTCCAAGAGAATCCTTACTCCGATGGCACCATCGCTGCCGGACAAA
AACTGAGCACCGCTCTGGCGAATGCTAAGAAAGACCGCTGGATCGAGCTGCTCGAG
AACCTGGACATGTCCAAGTCTAGCCGGAAAGCTTGGCAGCTCCTGCGCCGGCTGGA
CAGCGACCCCCTCGTGAATCCTGGCCATGCCAATGTAACGCCGGACCAGATCGCCC
ATCAACTGATCCAGAACGGCAAGACCAATTGCAGTAGAATCAAGATGAAGATCAAC
AGAGTACCCGAGTTGGAAACACACCAGCTGTCTAGTCCTCTCAACCTCAAAGAGCTC
CGCGAAGCAATCAAAAGGTGTAAGACGGGCAAAGCTCCCGGTCTGGATGACCTGAT
GATGGAACAGATCAAACACTTGGGGGCCAAGGCTGAGAACTGGTTGCTGAAATTCT
ACAACCAGTGCCTGGCTCACAAGCAGATCCCCCGTGCGTGGCGCAAGACTAAGATT
ATCGCCATCTTGAAGCCGGGCAAGGATGCTAGTAACGCCCGCAACTACCGTCCTATT
TCCCTCCTGTGTCACCTTTACAAGGTGTACGAGCGCATGCTCCTGAACCGCTTGGGC
CCCGTCATCGAGCCTAAACTGATCGCCCAACAGGCTGGTTTCCGCCCAGGTAAGAAC
TGCACTGGACAGATCCTGCACCTTACGGAGCACATCGAGGAAGGTTACGAGAAGGG
CTGCATCACCGGAACCGTCTTCGTGGACCTGACTGCGGCCTACGACACGGTTCAGCA
CAGAAAAATGCTCCACAAGGTATATCATATTACCCGGGATTTCGACTTCACCAAAAC
AGTGCAGACGCTTCTGGAGAATCGCTCCTTTTACGTCGAGTTCCAGGGTCAGAAAAG
TCGGTGGAGGCGCCAGAAGAACGGCTTGCCCCAGGGTAGCGTGCTCGCCCCAACCC
TGTTTAATATCTTCACCAACGACCAGCCACAGCCCCCGCTGACAAAATCCTTTATCT
ATGCCGACGATCTTGGCCTGACCACGCAAGCCAAGGACTTTGAGACAGTCGAGAAA
CAGCTCACAAACGCACTCAAGGACCTGAGTTCCTATTACAAGGAGAACCATCTCAA
ACCTAACCCCGCTAAGACACAGGTCTGCGCTTTTCACCTGAGGAATCGGGAGGCCA
ACCGTAAACTGAAGGTGACATGGGAGGGACAGGAACTGGAGCACTGTTTCCACCCC
AAGTATTTGGGCGTGACTCTCGATCGCACCCTTACGTATCGGAAGCACTGCATGAAC
ACTAAGCATAAGGTGGCGGCCAGAAATAACATCCTGCGTAAACTCACAGGAAGCGC
CTGGGGCGCCGACCCACAGGTCATCCGTACCAGTGCTCTGGCCCTGTCTTTCTCCAC
TGCTGAATATGCGTGTCCGGTGTGGCACAAGTCCGCCCACGCGAAGCAGGTGGATA
TTGCCCTGAACGAGACATGCCGGATTATCACTGGTTGCCTCAAGCCTACCCCCGTCG
ACAAGCTCTATAAGTTGGCCGGCATTGCACCCCCTGATGTCCGTCGCGAAGTCGCAG
CCAATGGCGAGCGGAAAAAGGTAGAACACTGCGAATCACATCCGCTGCATGGATAT
CATCCCCCTCCCACCCGGCTTAAGAGCCGTAAGGGCTTCATGCGCACAACCACTCCG
CTGGATGTGCCTCCCGCTGCCGCGCGCGTGAGTCTGTGGGCCGCTAAGCCCGGTAAT
TCCAATTGGATGGCACCGCAAGAGGGCCTCCCGCCCGGAGCCAATCAAGAGTGGGC
CACATGGAAGTCCTTGAACAGGCTGCGCTCCGGTGTGGGACGCTCTAAGGACAACC
TGGCCCGTTGGCACTATCTGGAAGAGTCATCCACCCTGTGCGACTGTGGTGCTGAAC
AGACTACCCAGCACATGTACGCTTGCCCCCAATGCCCTGCCTCCTGCACGGAAGAGG
AACTCTTTAAGGCAACCGATAACGCAGTGGCAGTGGCGCGCTTTTGGAGTAAGACA
ATC

The Vingi-1_Acar driver encoded by the nucleic acid has an amino acid sequence of:

(SEQ ID NO: 405)
MDEYQRSLSRPLLTIMSINIEGLSLAKEELLAKMSEDISCDILCIQETHRDITMRRPKILGM
QLAVERPHRQYGSAIFVRSGVAISATSLTEVNNIEILSVELDSCTVSSLYKPPGADFYFTPP
TSCHNHEAHFVVGDFNSHSCVWGYDEDDRNGEAVLTWADNSRMSLLHDSKLPPSFNS
GRWKRGYNPDLIFVKESISHQCTKRVLNPIPNTQHRPICCVAYAAVRPKSVPFRRRYNFN
KANWTKFTETLEAAISDIEPSIENYDLFVEAVKRSSRLSIPRGCRTSYLPGLNEESLNQLQ
EYLRLFQENPYSDGTIAAGQKLSTALANAKKDRWIELLENLDMSKSSRKAWQLLRRLD
SDPLVNPGHANVTPDQIAHQLIQNGKTNCSRIKMKINRVPELETHQLSSPLNLKELREAIK
RCKTGKAPGLDDLMMEQIKHLGAKAENWLLKFYNQCLAHKQIPRAWRKTKIIAILKPG
KDASNARNYRPISLLCHLYKVYERMLLNRLGPVIEPKLIAQQAGFRPGKNCTGQILHLTE
HIEEGYEKGCITGTVFVDLTAAYDTVQHRKMLHKVYHITRDFDFTKTVQTLLENRSFYV
EFQGQKSRWRRQKNGLPQGSVLAPTLFNIFTNDQPQPPLTKSFIYADDLGLTTQAKDFET
VEKQLTNALKDLSSYYKENHLKPNPAKTQVCAFHLRNREANRKLKVTWEGQELEHCF
HPKYLGVTLDRTLTYRKHCMNTKHKVAARNNILRKLTGSAWGADPQVIRTSALALSFS
TAEYACPVWHKSAHAKQVDIALNETCRIITGCLKPTPVDKLYKLAGIAPPDVRREVAAN
GERKKVEHCESHPLHGYHPPPTRLKSRKGFMRTTTPLDVPPAAARVSLWAAKPGNSNW
MAPQEGLPPGANQEWATWKSLNRLRSGVGRSKDNLARWHYLEESSTLCDCGAEQTTQ
HMYACPQCPASCTEEELFKATDNAVAVARFWSKTI

The Vingi-1_Acar gene modifying system further comprises a template RNA having a sequence of:

(SEQ ID NO: 1000)
AGGGGGACACGGAAAGAGCCTCCCCGAAGATTGAGTGAATTCAGTCGGGCGTCCCC
TGGGCAACGTTTCTTGTAAGCGGCCGATCTTTCCACCCCAAAAGCATTGGATGAGTT
TACGGATCCGAATTCTCGACGGATCGATCCGAACAAACGACCCAACACCCGTGCGT
TTTATTCTGTCTTTTTATTGCCGATCCCCCGGCCGCTTTACTTGTACAGCTCGTCCATG
CCGAGAGTGATCCCGGCGGCGGTCACGAACTCCAGCAGGACCATGTGATCGCGCTT
CTCGTTGGGGTCTTTGCTCAGGGCGGACTGGGTGCTCAGGTAGTGGTTGTCGGGCAG
CAGCACGGGGCCGTCGCCGATGGGGGTGTTCTGCTGGTAGTGGTCGGCGAGCTGCA
CGCTGCCGTCCTCGATGTTGTGGCGGATCTTGAAGTTCACCTTGATGCCGTTCTTCTG
CTTGTCGGCCATGATATAGACGTTGTGGCTGTTGTAGTTGTACTCCAGCTTGTGCCCC
AGGATGTTGCCGTCCTCCTTGAAGTCGATGCCCTTCAGCTCGATGCGGTTCACCAGG
GTGTCGCCCTCGAACTTCACCTCGGCGCGGGTCTTGTAGTTGCCGTCGTCCTTGAAG
AAGATGGTGCGCTCCTGGACGTAGCCTTCGGGCATGGCGGACTTGAAGAAGTCGTG
CTGCTTCATGTGGTCGGGGTAGCGGCTGAAGCACTGCACGCCGTAGGTCAGGGTGGT
CACGAGGGTGGGCCAGGGCACGGGCAGCTTGCCGGTGGTGCAGATGAACTTCAGGG
TCAGCTTGCCGTAGGTGGCATCGCCCTCGCCCTCGCCGGACACGCTGAACTTGTGGC
CGTTTACGTCGCCGTCCAGCTCGACCAGGATGGGCACCACCCCGGTGAACAGCTCCT
CGCCCTTGCTCACCATGGTGGCTTTACCAACAGTACCGGAATGCCAAGCTTGGGTCC
TGTGTTCTGGCGGCAAACCCGTTGCGAAAAAGAACGTTCACGGCGACTACTGCACTT
ATATACGGTTCTCCCCCACCCTCGGGAAAAAGGCGGAGCCAGTACACGACATCACT
TTCCCAGTTTACCCCGCGCCACCTTCTCTAGGCACCGGATCAATTGCCGACCCCTCCC
CCCAACTTCTCGGGGACTGTGGGCGATGTGCGCTCTGCCCTAGTTGCTTGTGATTTCT
TTTCTTTTTTATTTTATTTCCATTATTTGAAATGTATTTGTTGTAGCAATGCTTTTGAC
ACGAAATAAATAAAAGAAAAAAAAAAAAAAAAAAAAAAAAAAAAAAAAAAAAAA
AAAAAAAAAAAAAAAAAAAAAAAAAAAAAAAAAAAAAAAAAA

[1088] Briefly, the template RNA for use with the Vingi-1_Acar, CR1-1_PH, RTE-1_MD, and RTE-3_BF gene modifying systems comprises the following sequences from 5′ to 3′: 5′UTR, GFP, EF1alpha, 3′UTR and was co-delivered with the driver RNA. An inactive template RNA without UTR sequences was co-delivered with the driver RNA as a negative control. Vingi-1_Acar template RNA alone or driver RNA alone were also used as negative controls. The topoisomerase II inhibitor etoposide was added to the cells to promote DNA damage and was used as a positive control.

[1089] The gene modifying systems and any control constructs were introduced as RNAs into either iPSC or activated T cells using Neon transfection system or Amaxa 4D-Nucleofector system, respectively.

[1090] Induction of the DNA damage response was assessed using the following methodology. Briefly, antibodies directed to phosphorylated p53, p21, and Vinculin were used for western blot on cell lysates from iPSC or T cells transfected 24 hours earlier with the RNAs of the gene modifying system or appropriate controls. Phosphorylated p53 and p21 are known markers of DNA damage while vinculin is a commonly used control for western blot analysis.

[1091] As shown in FIG. 3A, Vingi-1_Acar, CR1-1_PH, RTE-1_MD, and RTE-3_BF gene modifying systems drive integration and expression of a template in iPSC or T cells when delivered as all-RNA compositions.

[1092] As shown in FIG. 3B, introduction and editing using a gene modifying system did not activate the DNA damage response in T cells and iPSCs. In contrast, introduction of etoposide activated DNA damage response, as shown by the increased western blot signal using anti-phosphorylated p53 and anti-p21 antibodies.

### Example 3: Retrotransposon-Based Gene Modifying Systems do not Activate Interferon Response in Primary Cells

[1093] This example demonstrates that cell editing using a gene modifying system described herein does not activate interferon response in primary cells.

[1094] The gene modifying system used in this Example comprises a nucleic acid encoding a Vingi-1_Acar driver having a nucleic acid sequence of:

(SEQ ID NO: 900)
ATGGACGAGTACCAGCGCTCCTTGTCCCGCCCCCTGTTGACAATCATGAGTATTAAT
ATCGAAGGCTTGAGCCTCGCGAAAGAGGAACTGCTTGCCAAGATGTCCGAGGACAT
CAGCTGCGACATTCTGTGCATCCAAGAGACCCATCGCGACATCACCATGCGTCGCCC
CAAGATCCTCGGTATGCAGCTTGCGGTGGAGCGCCCTCACCGCCAGTACGGCTCCGC
GATTTTCGTGCGTTCCGGTGTGGCCATTTCTGCTACCAGCCTCACCGAGGTTAACAAT
ATTGAGATCCTGTCAGTGGAGCTCGATTCCTGTACCGTCTCCAGTCTGTACAAACCT
CCCGGTGCAGACTTCTACTTTACTCCCCCGACGTCTTGCCACAACCATGAGGCTCAT
TTTGTGGTTGGTGATTTCAATTCCCACTCCTGCGTGTGGGGCTATGACGAGGATGAC
CGCAACGGCGAAGCTGTTCTGACCTGGGCCGATAATTCCCGCATGTCCCTGCTCCAC
GATAGTAAGCTGCCTCCCTCCTTCAACAGTGGGAGATGGAAGCGCGGGTACAACCC
TGATCTTATCTTCGTCAAAGAATCCATCTCTCATCAGTGTACCAAGCGCGTCCTCAAC
CCGATTCCTAACACTCAGCACCGCCCCATTTGTTGCGTAGCATATGCTGCCGTGCGT
CCCAAGTCTGTCCCCTTCAGAAGGAGATACAACTTCAACAAGGCTAACTGGACCAA
GTTTACCGAAACCTTGGAAGCGGCAATCTCCGACATTGAGCCATCTATCGAGAATTA
TGATCTCTTCGTTGAGGCAGTCAAGCGGTCCTCTCGCCTGAGTATCCCCCGTGGATG
TAGGACCTCCTACCTGCCCGGCCTGAACGAAGAGTCACTCAATCAGCTGCAGGAAT
ACCTGCGCCTGTTCCAAGAGAATCCTTACTCCGATGGCACCATCGCTGCCGGACAAA
AACTGAGCACCGCTCTGGCGAATGCTAAGAAAGACCGCTGGATCGAGCTGCTCGAG
AACCTGGACATGTCCAAGTCTAGCCGGAAAGCTTGGCAGCTCCTGCGCCGGCTGGA
CAGCGACCCCCTCGTGAATCCTGGCCATGCCAATGTAACGCCGGACCAGATCGCCC
ATCAACTGATCCAGAACGGCAAGACCAATTGCAGTAGAATCAAGATGAAGATCAAC
AGAGTACCCGAGTTGGAAACACACCAGCTGTCTAGTCCTCTCAACCTCAAAGAGCTC
CGCGAAGCAATCAAAAGGTGTAAGACGGGCAAAGCTCCCGGTCTGGATGACCTGAT
GATGGAACAGATCAAACACTTGGGGGCCAAGGCTGAGAACTGGTTGCTGAAATTCT
ACAACCAGTGCCTGGCTCACAAGCAGATCCCCCGTGCGTGGCGCAAGACTAAGATT
ATCGCCATCTTGAAGCCGGGCAAGGATGCTAGTAACGCCCGCAACTACCGTCCTATT
TCCCTCCTGTGTCACCTTTACAAGGTGTACGAGCGCATGCTCCTGAACCGCTTGGGC
CCCGTCATCGAGCCTAAACTGATCGCCCAACAGGCTGGTTTCCGCCCAGGTAAGAAC
TGCACTGGACAGATCCTGCACCTTACGGAGCACATCGAGGAAGGTTACGAGAAGGG
CTGCATCACCGGAACCGTCTTCGTGGACCTGACTGCGGCCTACGACACGGTTCAGCA
CAGAAAAATGCTCCACAAGGTATATCATATTACCCGGGATTTCGACTTCACCAAAAC
AGTGCAGACGCTTCTGGAGAATCGCTCCTTTTACGTCGAGTTCCAGGGTCAGAAAAG
TCGGTGGAGGCGCCAGAAGAACGGCTTGCCCCAGGGTAGCGTGCTCGCCCCAACCC
TGTTTAATATCTTCACCAACGACCAGCCACAGCCCCCGCTGACAAAATCCTTTATCT
ATGCCGACGATCTTGGCCTGACCACGCAAGCCAAGGACTTTGAGACAGTCGAGAAA
CAGCTCACAAACGCACTCAAGGACCTGAGTTCCTATTACAAGGAGAACCATCTCAA
ACCTAACCCCGCTAAGACACAGGTCTGCGCTTTTCACCTGAGGAATCGGGAGGCCA
ACCGTAAACTGAAGGTGACATGGGAGGGACAGGAACTGGAGCACTGTTTCCACCCC
AAGTATTTGGGCGTGACTCTCGATCGCACCCTTACGTATCGGAAGCACTGCATGAAC
ACTAAGCATAAGGTGGCGGCCAGAAATAACATCCTGCGTAAACTCACAGGAAGCGC
CTGGGGCGCCGACCCACAGGTCATCCGTACCAGTGCTCTGGCCCTGTCTTTCTCCAC
TGCTGAATATGCGTGTCCGGTGTGGCACAAGTCCGCCCACGCGAAGCAGGTGGATA
TTGCCCTGAACGAGACATGCCGGATTATCACTGGTTGCCTCAAGCCTACCCCCGTCG
ACAAGCTCTATAAGTTGGCCGGCATTGCACCCCCTGATGTCCGTCGCGAAGTCGCAG
CCAATGGCGAGCGGAAAAAGGTAGAACACTGCGAATCACATCCGCTGCATGGATAT
CATCCCCCTCCCACCCGGCTTAAGAGCCGTAAGGGCTTCATGCGCACAACCACTCCG
CTGGATGTGCCTCCCGCTGCCGCGCGCGTGAGTCTGTGGGCCGCTAAGCCCGGTAAT
TCCAATTGGATGGCACCGCAAGAGGGCCTCCCGCCCGGAGCCAATCAAGAGTGGGC
CACATGGAAGTCCTTGAACAGGCTGCGCTCCGGTGTGGGACGCTCTAAGGACAACC
TGGCCCGTTGGCACTATCTGGAAGAGTCATCCACCCTGTGCGACTGTGGTGCTGAAC
AGACTACCCAGCACATGTACGCTTGCCCCCAATGCCCTGCCTCCTGCACGGAAGAGG
AACTCTTTAAGGCAACCGATAACGCAGTGGCAGTGGCGCGCTTTTGGAGTAAGACA
ATC

The Vingi-1_Acar driver encoded by the nucleic acid has an amino acid sequence of:

(SEQ ID NO: 405)
MDEYQRSLSRPLLTIMSINIEGLSLAKEELLAKMSEDISCDILCIQETHRDITMRRPKILGM
QLAVERPHRQYGSAIFVRSGVAISATSLTEVNNIEILSVELDSCTVSSLYKPPGADFYFTPP
TSCHNHEAHFVVGDFNSHSCVWGYDEDDRNGEAVLTWADNSRMSLLHDSKLPPSFNS
GRWKRGYNPDLIFVKESISHQCTKRVLNPIPNTQHRPICCVAYAAVRPKSVPFRRRYNFN
KANWTKFTETLEAAISDIEPSIENYDLFVEAVKRSSRLSIPRGCRTSYLPGLNEESLNQLQ
EYLRLFQENPYSDGTIAAGQKLSTALANAKKDRWIELLENLDMSKSSRKAWQLLRRLD
SDPLVNPGHANVTPDQIAHQLIQNGKTNCSRIKMKINRVPELETHQLSSPLNLKELREAIK
RCKTGKAPGLDDLMMEQIKHLGAKAENWLLKFYNQCLAHKQIPRAWRKTKIIAILKPG
KDASNARNYRPISLLCHLYKVYERMLLNRLGPVIEPKLIAQQAGFRPGKNCTGQILHLTE
HIEEGYEKGCITGTVFVDLTAAYDTVQHRKMLHKVYHITRDFDFTKTVQTLLENRSFYV
EFQGQKSRWRRQKNGLPQGSVLAPTLFNIFTNDQPQPPLTKSFIYADDLGLTTQAKDFET
VEKQLTNALKDLSSYYKENHLKPNPAKTQVCAFHLRNREANRKLKVTWEGQELEHCF
HPKYLGVTLDRTLTYRKHCMNTKHKVAARNNILRKLTGSAWGADPQVIRTSALALSFS
TAEYACPVWHKSAHAKQVDIALNETCRIITGCLKPTPVDKLYKLAGIAPPDVRREVAAN
GERKKVEHCESHPLHGYHPPPTRLKSRKGFMRTTTPLDVPPAAARVSLWAAKPGNSNW
MAPQEGLPPGANQEWATWKSLNRLRSGVGRSKDNLARWHYLEESSTLCDCGAEQTTQ
HMYACPQCPASCTEEELFKATDNAVAVARFWSKTI

The Vingi-1_Acar gene modifying system further comprises a template RNA having a sequence of:

(SEQ ID NO: 1000)
AGGGGGACACGGAAAGAGCCTCCCCGAAGATTGAGTGAATTCAGTCGGGCGTCCCC
TGGGCAACGTTTCTTGTAAGCGGCCGATCTTTCCACCCCAAAAGCATTGGATGAGTT
TACGGATCCGAATTCTCGACGGATCGATCCGAACAAACGACCCAACACCCGTGCGT
TTTATTCTGTCTTTTTATTGCCGATCCCCCGGCCGCTTTACTTGTACAGCTCGTCCATG
CCGAGAGTGATCCCGGCGGCGGTCACGAACTCCAGCAGGACCATGTGATCGCGCTT
CTCGTTGGGGTCTTTGCTCAGGGCGGACTGGGTGCTCAGGTAGTGGTTGTCGGGCAG
CAGCACGGGGCCGTCGCCGATGGGGGTGTTCTGCTGGTAGTGGTCGGCGAGCTGCA
CGCTGCCGTCCTCGATGTTGTGGCGGATCTTGAAGTTCACCTTGATGCCGTTCTTCTG
CTTGTCGGCCATGATATAGACGTTGTGGCTGTTGTAGTTGTACTCCAGCTTGTGCCCC
AGGATGTTGCCGTCCTCCTTGAAGTCGATGCCCTTCAGCTCGATGCGGTTCACCAGG
GTGTCGCCCTCGAACTTCACCTCGGCGCGGGTCTTGTAGTTGCCGTCGTCCTTGAAG
AAGATGGTGCGCTCCTGGACGTAGCCTTCGGGCATGGCGGACTTGAAGAAGTCGTG
CTGCTTCATGTGGTCGGGGTAGCGGCTGAAGCACTGCACGCCGTAGGTCAGGGTGGT
CACGAGGGTGGGCCAGGGCACGGGCAGCTTGCCGGTGGTGCAGATGAACTTCAGGG
TCAGCTTGCCGTAGGTGGCATCGCCCTCGCCCTCGCCGGACACGCTGAACTTGTGGC
CGTTTACGTCGCCGTCCAGCTCGACCAGGATGGGCACCACCCCGGTGAACAGCTCCT
CGCCCTTGCTCACCATGGTGGCTTTACCAACAGTACCGGAATGCCAAGCTTGGGTCC
TGTGTTCTGGCGGCAAACCCGTTGCGAAAAAGAACGTTCACGGCGACTACTGCACTT
ATATACGGTTCTCCCCCACCCTCGGGAAAAAGGCGGAGCCAGTACACGACATCACT
TTCCCAGTTTACCCCGCGCCACCTTCTCTAGGCACCGGATCAATTGCCGACCCCTCCC
CCCAACTTCTCGGGGACTGTGGGCGATGTGCGCTCTGCCCTAGTTGCTTGTGATTTCT
TTTCTTTTTTATTTTATTTCCATTATTTGAAATGTATTTGTTGTAGCAATGCTTTTGAC
ACGAAATAAATAAAAGAAAAAAAAAAAAAAAAAAAAAAAAAAAAAAAAAAAAAA
AAAAAAAAAAAAAAAAAAAAAAAAAAAAAAAAAAAAAAAAAA

[1095] Briefly, the template RNA for use with the Vingi-1_Acar gene modifying system comprises the following sequences from 5′ to 3′: 5′UTR, GFP, EF1alpha, 3′UTR and was co-delivered with the driver RNA. Vingi-1 Acar template RNA alone was used as negative controls. An RNA sample with high levels of double stranded RNA contaminants was used as a positive control.

[1096] The gene modifying systems and any control constructs were introduced as RNAs into activated T cells using Amaxa 4D-Nucleofector system.

[1097] Induction of interferon response was assessed using the following methodology. Briefly, cellular RNA was collected from activated T cells 24 hours after transfection with the RNAs of the gene modifying system or appropriate controls. Cellular IFNB1, CXCL10, and RPS18 RNA were quantified by quantitative RT-PCR. IFNB1 and CXCL10 are known markers of interferon response while RPS18 is a housekeeping gene commonly used as control for quantitative RT-PCR analysis.

[1098] As shown in FIG. 4, introduction and editing using a gene modifying system did not activate interferon response in T cells. In contrast, introduction of high levels of dsRNA contaminants activated interferon response, as shown by the increased expression of IFNB1 and CXCL10 genes. The integration of a template sequence using gene modifying systems resulted in expression of up to 35% in T-cells (FIG. 3A) without activation of p53 or interferon responses.

### Example 4: Endonuclease Activity of Retrotransposon-Based Gene Modifying Systems

[1099] Residues potentially involved in endonuclease activity in a Vingi-1_Acar or CR1-1_PH driver were identified. Mutation D191A was introduced into the endonuclease domain of a wild type Vingi-1_Acar, and likewise D250A was introduced into the wild type CR1-1_PH endonuclease domain. The mutant polypeptides were tested for endonuclease activity. The wild type and mutant drivers were delivered to cells with a template including a transgene via plasmid nucleofection in order to compare the ability of the wild type and mutant protein to drive retrotransposition.

[1100] The wild type Vingi-1_Acar gene modifying system used in this Example comprises a nucleic acid encoding a Vingi-1_Acar driver having a nucleic acid sequence of:

(SEQ ID NO: 900)
atggacgagtaccagcgctccttgtcccgccccctgttgacaatcatgagtattaatatcgaaggcttgagcctcgcgaaagaggaactgctt
gccaagatgtccgaggacatcagctgcgacattctgtgcatccaagagacccatcgcgacatcaccatgcgtcgccccaagatcctcggta
tgcagcttgcggtggagcgccctcaccgccagtacggctccgcgattttcgtgcgttccggtgtggccatttctgctaccagcctcaccgag
gttaacaatattgagatcctgtcagtggagctcgattcctgtaccgtctccagtctgtacaaacctcccggtgcagacttctactttactcccc
cgacgtcttgccacaaccatgaggctcattttgtggttggtgatttcaattcccactcctgcgtgtggggctatgacgaggatgaccgcaacgg
cgaagctgttctgacctgggccgataattcccgcatgtccctgctccacgatagtaagctgcctccctccttcaacagtgggagatggaagcg
cgggtacaaccctgatcttatcttcgtcaaagaatccatctctcatcagtgtaccaagcgcgtcctcaacccgattcctaacactcagcaccgc
cccatttgttgcgtagcatatgctgccgtgcgtcccaagtctgtccccttcagaaggagatacaacttcaacaaggctaactggaccaagttta
ccgaaaccttggaagcggcaatctccgacattgagccatctatcgagaattatgatctcttcgttgaggcagtcaagcggtcctctcgcctga
gtatcccccgtggatgtaggacctcctacctgcccggcctgaacgaagagtcactcaatcagctgcaggaatacctgcgcctgttccaaga
gaatccttactccgatggcaccatcgctgccggacaaaaactgagcaccgctctggcgaatgctaagaaagaccgctggatcgagctgct
cgagaacctggacatgtccaagtctagccggaaagcttggcagctcctgcgccggctggacagcgaccccctcgtgaatcctggccatgc
caatgtaacgccggaccagatcgcccatcaactgatccagaacggcaagaccaattgcagtagaatcaagatgaagatcaacagagtacc
cgagttggaaacacaccagctgtctagtcctctcaacctcaaagagctccgcgaagcaatcaaaaggtgtaagacgggcaaagctcccgg
tctggatgacctgatgatggaacagatcaaacacttgggggccaaggctgagaactggttgctgaaattctacaaccagtgcctggctcaca
agcagatcccccgtgcgtggcgcaagactaagattatcgccatcttgaagccgggcaaggatgctagtaacgcccgcaactaccgtcctat
ttccctcctgtgtcacctttacaaggtgtacgagcgcatgctcctgaaccgcttgggccccgtcatcgagcctaaactgatcgcccaacaggc
tggtttccgcccaggtaagaactgcactggacagatcctgcaccttacggagcacatcgaggaaggttacgagaagggctgcatcaccgg
aaccgtcttcgtggacctgactgcggcctacgacacggttcagcacagaaaaatgctccacaaggtatatcatattacccgggatttcgactt
caccaaaacagtgcagacgcttctggagaatcgctccttttacgtcgagttccagggtcagaaaagtcggtggaggcgccagaagaacgg
cttgccccagggtagcgtgctcgccccaaccctgtttaatatcttcaccaacgaccagccacagcccccgctgacaaaatcctttatctatgc
cgacgatcttggcctgaccacgcaagccaaggactttgagacagtcgagaaacagctcacaaacgcactcaaggacctgagttcctattac
aaggagaaccatctcaaacctaaccccgctaagacacaggtctgcgcttttcacctgaggaatcgggaggccaaccgtaaactgaaggtg
acatgggagggacaggaactggagcactgtttccaccccaagtatttgggcgtgactctcgatcgcacccttacgtatcggaagcactgcat
gaacactaagcataaggtggcggccagaaataacatcctgcgtaaactcacaggaagcgcctggggcgccgacccacaggtcatccgta
ccagtgctctggccctgtctttctccactgctgaatatgcgtgtccggtgtggcacaagtccgcccacgcgaagcaggtggatattgccctga
acgagacatgccggattatcactggttgcctcaagcctacccccgtcgacaagctctataagttggccggcattgcaccccctgatgtccgtc
gcgaagtcgcagccaatggcgagcggaaaaaggtagaacactgcgaatcacatccgctgcatggatatcatccccctcccacccggctta
agagccgtaagggcttcatgcgcacaaccactccgctggatgtgcctcccgctgccgcgcgcgtgagtctgtgggccgctaagcccggta
attccaattggatggcaccgcaagagggcctcccgcccggagccaatcaagagtgggccacatggaagtccttgaacaggctgcgctcc
ggtgtgggacgctctaaggacaacctggcccgttggcactatctggaagagtcatccaccctgtgcgactgtggtgctgaacagactaccc
agcacatgtacgcttgcccccaatgccctgcctcctgcacggaagaggaactctttaaggcaaccgataacgcagtggcagtggcgcgctt
ttggagtaagacaatc

[1101] The wild type CR1-1PH gene modifying system used in this Example comprises a nucleic acid encoding a CR1-1_PH driver having a nucleic acid sequence of:

(SEQ ID NO: 901)
atgctgtataccatcttcctcgtttatgggatcctgtgttttttctttgtgtatttctgcatctacctgtacatcactgtttatctttgtttt
ctgttctttctgtttctgcttctgtgcggtgacgtggaaagcaatcctggaccaggcagagcccgtggatgtcggttgctgtattgcaacatc
cgcggtctgcatgctaatctggccgagctggactttgttagtcgcggggtggacgtggtctgctgttccgagactctggtggctgggcgtcgc
cacgatgccgagttggccctcgctggcttccagtccccctttcgtaggctctgtggctcaggccctggcttccgtggcatggcggtgtacgtc
aggtctgggttctgtgcctaccggcagagtgtgcacgaatgtgcctgccacgagattatcgtcgttcgcgtgtgtggacgtctgaacaatta
ctatctgttctctctctaccgctccccggccaccgatgactccctttacgattgccttctgactgccatggccagcatccagtccactgatcc
gaaggcagccttcgtcttcgttggcgacgtaaacgcacatcaccgggactggctgggaagcgcctctccaacagattgtcacggcgtcgccgc
tctggacttttgcaccctttccagctgcgtgcaactcgtccgtgggtccactcatatcgctggaaactgtctggatctggtgatgaccgacgt
gcctgacctgatgaccgtgaccgtcggatccccgattggaagtagcgaccactcccacctggtggtctcactggatctcaaccaggtcgtgcc
tgttgtggatacacgcagggttgtgttcgtgaagagccgcgccaactgggtcgccatcactcgcgctgtgaggactctgccttggcggcagat
tatccactccgaggaccctgtaagtgagctcaatgacctgaccgtgtctattctggaacgctttgttcccaagcgcaccatcctcgtgagaag
ccgcgataagccttggttcgatgaccagtgtagactggctttcgaggctaagcaggggcttaccgtgcttggcgtaggagtcgggaccgcacg
ttgtggcagacctatgtggacaggcgggccgaggccaagcgcgtgtatgaagaggctcagaggcgccttcgccagaggagccgtgaaagcctg
ctcagtattgaccaccctcatcgctggtggtcagagctcaagggctccgtgttcggcgccgaacccagcctgccccctctcgttggtcctggc
ggtggaatcattaccgatcccctcgccagggccgagctgctctccgcacattttgatggaaagcagtcacgcgatgtcatcgccttgccccac
ggttgccacccggagccccgcctcacatctctggccttcaggtccggcgctatcaaggtcctcctggaaggactcgacccctacggtggc
gttgaccccgtcggcatgtttcctctgttttacaagcagctggcggacgtcctggccccaaagttggccgttatctttcgtcggctgatccgc
ctcggcaactttccccgctgctggcgcactggtaatatcactcccatccccaagggccccgtgagtccttacgtggccaattaccgtcccatc
accttgacacctatcctgtctaaggttttcgaaaagctgatcgcaggcaagctgggtcgctttgctgaagtcactggcttgctccctgctggt
cagtttgcttatcgcatcggtctgggctgctgtgacgctctcctgtccgtgagccatcacctgcagtccgccctggactgccgctccgaagcc
cgcctggtgcagctcgatttctccgcagcgtttgaccgcgttaatcacaggggtcttctgtataaattggagtccttcggcgtcgggggccgg
gtgctgtcaattatccgtgatttcgtatccgagcgcacccagtctgtatccgtggacggtgttctgtccgccagcgtcggcgtggttagcgga
gtcccccagggtagcgtgctgggacctctgctctttgtattgtatacgtccgacatgttctctagcctggagaataccctcattaactatgca
gatgactccactttgatggcagttattccggccccacgcctgcgtgacgccgtagcgcagtccctgaatagggacctgtcacgcatcagtgcc
tggtgttcagcttggtccatgaagctgaacgcgtccaagaccaaaagcatgattatctcaaggtccaggactttggtgcctcaacacccccag
ctggagatcgacgatactttgctgcaggagtcctcatccctggaaatcctgggcgtcgtgttcgatgagaagctcaccttcgagcctcacatc
aggcggctggtgagccgcgcgtctaccaagatcgggctgctccgcaaggtgaactccgtgttcggcgattcccaggtcgcgaggcgttgcttt
tacgctttcctgctccctgtgctggagtactgctctccggtatgggcgagtgccgcggatacccatcttcgtcttctggaccgccttgtctcc
agcgccagccgtttgtgtgctgacaacgatctggtgaacctgagtcaccgtcggcgcgtggctgagctgtgtatgttctacaaggtgtacaat
aacgagaggcattggctgtactcatccctgccagccctgaaggtcttcgggcgcgaaacgcgtgccgcgtgcggtgctcactcttttacgttgg
aggcggttcgctgtcgcaccaaccagttctgccgctgctttgtgccttggtctgcgaaggtgtggaacctgctccctgcctccgctttcggga
gaatcggtctgcaggcatttaaaagcgctgtgaacggtttcctgttggactttctg

[1102] The wild-type Vingi-1_Acar driver encoded by the nucleic acid has an amino acid sequence of:

Vingi-1_Acar WT
(SEQ ID NO: 405)
MDEYQRSLSRPLLTIMSINIEGLSLAKEELLAKMSEDISCDILCIQETHRDITMRRPKILGM
QLAVERPHRQYGSAIFVRSGVAISATSLTEVNNIEILSVELDSCTVSSLYKPPGADFYFTPP
TSCHNHEAHFVVGDFNSHSCVWGYDEDDRNGEAVLTWADNSRMSLLHDSKLPPSFNS
GRWKRGYNPDLIFVKESISHQCTKRVLNPIPNTQHRPICCVAYAAVRPKSVPFRRRYNFN
KANWTKFTETLEAAISDIEPSIENYDLFVEAVKRSSRLSIPRGCRTSYLPGLNEESLNQLQ
EYLRLFQENPYSDGTIAAGQKLSTALANAKKDRWIELLENLDMSKSSRKAWQLLRRLD
SDPLVNPGHANVTPDQIAHQLIQNGKTNCSRIKMKINRVPELETHQLSSPLNLKELREAIK
RCKTGKAPGLDDLMMEQIKHLGAKAENWLLKFYNQCLAHKQIPRAWRKTKIIAILKPG
KDASNARNYRPISLLCHLYKVYERMLLNRLGPVIEPKLIAQQAGFRPGKNCTGQILHLTE
HIEEGYEKGCITGTVFVDLTAAYDTVQHRKMLHKVYHITRDFDFTKTVQTLLENRSFYV
EFQGQKSRWRRQKNGLPQGSVLAPTLFNIFTNDQPQPPLTKSFIYADDLGLTTQAKDFET
VEKQLTNALKDLSSYYKENHLKPNPAKTQVCAFHLRNREANRKLKVTWEGQELEHCF
HPKYLGVTLDRTLTYRKHCMNTKHKVAARNNILRKLTGSAWGADPQVIRTSALALSFS
TAEYACPVWHKSAHAKQVDIALNETCRIITGCLKPTPVDKLYKLAGIAPPDVRREVAAN
GERKKVEHCESHPLHGYHPPPTRLKSRKGFMRTTTPLDVPPAAARVSLWAAKPGNSNW
MAPQEGLPPGANQEWATWKSLNRLRSGVGRSKDNLARWHYLEESSTLCDCGAEQTTQ
HMYACPQCPASCTEEELFKATDNAVAVARFWSKTI

[1103] The wild-type CR1-1_PH driver encoded by the nucleic acid has an amino acid sequence of:

CR1-1_PH WT
(SEQ ID NO: 406)
MLYTIFLVYGILCFFFVYFCIYLYITVYLCFLFFLFLLLCGDVESNPGPGRARGCRLLYCNI
RGLHANLAELDFVSRGVDVVCCSETLVAGRRHDAELALAGFQSPFRRLCGSGPGFRGM
AVYVRSGFCAYRQSVHECACHEIIVVRVCGRLNNYYLFSLYRSPATDDSLYDCLLTAM
ASIQSTDPKAAFVFVGDVNAHHRDWLGSASPTDCHGVAALDFCTLSSCVQLVRGSTHIA
GNCLDLVMTDVPDLMTVTVGSPIGSSDHSHLVVSLDLNQVVPVVDTRRVVFVKSRAN
WVAITRAVRTLPWRQIIHSEDPVSELNDLTVSILERFVPKRTILVRSRDKPWFDDQCRLA
FEAKQAAYRAWRRSRDRTLWQTYVDRRAEAKRVYEEAQRRLRQRSRESLLSIDHPHR
WWSELKGSVFGAEPSLPPLVGPGGGIITDPLARAELLSAHFDGKQSRDVIALPHGCHPEP
RLTSLAFRSGAIKVLLEGLDPYGGVDPVGMFPLFYKQLADVLAPKLAVIFRRLIRLGNFP
RCWRTGNITPIPKGPVSPYVANYRPITLTPILSKVFEKLIAGKLGRFAEVTGLLPAGQFAY
RIGLGCCDALLSVSHHLQSALDCRSEARLVQLDFSAAFDRVNHRGLLYKLESFGVGGRV
LSIIRDFVSERTQSVSVDGVLSASVGVVSGVPQGSVLGPLLFVLYTSDMFSSLENTLINYA
DDSTLMAVIPAPRLRDAVAQSLNRDLSRISAWCSAWSMKLNASKTKSMIISRSRTL VPQ
HPQLEIDDTLLQESSSLEILGVVFDEKLTFEPHIRRLVSRASTKIGLLRKVNSVFGDSQVA
RRCFYAFLLPVLEYCSPVWASAADTHLRLLDRLVSSASRLCADNDLVNLSHRRRVAELC
MFYKVYNNERHWLYSSLPALKVFGRETRAACGAHSFTLEAVRCRTNQFCRCFVPWSA
KVWNLLPASAFGRIGLQAFKSAVNGFLLDFL

[1104] The mutated Vingi-1_Acar gene modifying system used in this Example comprises a nucleic acid encoding a mutated Vingi-1_Acar driver having a nucleic acid sequence of:

(SEQ ID NO: 902)
atggacgagtaccagcgctccttgtcccgccccctgttgacaatcatgagtattaatatcgaaggcttgagcctcgcgaaagaggaactgctt
gccaagatgtccgaggacatcagctgcgacattctgtgcatccaagagacccatcgcgacatcaccatgcgtcgccccaagatcctcggta
tgcagcttgcggtggagcgccctcaccgccagtacggctccgcgattttcgtgcgttccggtgtggccatttctgctaccagcctcaccgag
gttaacaatattgagatcctgtcagtggagctcgattcctgtaccgtctccagtctgtacaaacctcccggtgcagacttctactttactcccc
cgacgtcttgccacaaccatgaggctcattttgtggttggtgatttcaattcccactcctgcgtgtggggctatgacgaggatgaccgcaacgg
cgaagctgttctgacctgggccgataattcccgcatgtccctgctccacgatagtaagctgcctccctccttcaacagtgggagatggaagcg
cgggtacaaccctgcccttatcttcgtcaaagaatccatctctcatcagtgtaccaagcgcgtcctcaacccgattcctaacactcagcaccg
ccccatttgttgcgtagcatatgctgccgtgcgtcccaagtctgtccccttcagaaggagatacaacttcaacaaggctaactggaccaagttt
accgaaaccttggaagcggcaatctccgacattgagccatctatcgagaattatgatctcttcgttgaggcagtcaagcggtcctctcgcctg
agtatcccccgtggatgtaggacctcctacctgcccggcctgaacgaagagtcactcaatcagctgcaggaatacctgcgcctgttccaag
agaatccttactccgatggcaccatcgctgccggacaaaaactgagcaccgctctggcgaatgctaagaaagaccgctggatcgagctgc
tcgagaacctggacatgtccaagtctagccggaaagcttggcagctcctgcgccggctggacagcgaccccctcgtgaatcctggccatg
ccaatgtaacgccggaccagatcgcccatcaactgatccagaacggcaagaccaattgcagtagaatcaagatgaagatcaacagagtac
ccgagttggaaacacaccagctgtctagtcctctcaacctcaaagagctccgcgaagcaatcaaaaggtgtaagacgggcaaagctcccg
gtctggatgacctgatgatggaacagatcaaacacttgggggccaaggctgagaactggttgctgaaattctacaaccagtgcctggctcac
aagcagatcccccgtgcgtggcgcaagactaagattatcgccatcttgaagccgggcaaggatgctagtaacgcccgcaactaccgtcct
atttccctcctgtgtcacctttacaaggtgtacgagcgcatgctcctgaaccgcttgggccccgtcatgagcctaaactgatcgcccaacag
gctggtttccgcccaggtaagaactgcactggacagatcctgcaccttacggagcacatcgaggaaggttacgagaagggctgcatcacc
ggaaccgtcttcgtggacctgactgcggcctacgacacggttcagcacagaaaaatgctccacaaggtatatcatattacccgggatttcga
cttcaccaaaacagtgcagacgcttctggagaatcgctccttttacgtcgagttccagggtcagaaaagtcggtggaggcgccagaagaac
ggcttgccccagggtagcgtgctcgccccaaccctgtttaatatcttcaccaacgaccagccacagcccccgctgacaaaatcctttatctat
gccgacgatcttggcctgaccacgcaagccaaggactttgagacagtcgagaaacagctcacaaacgcactcaaggacctgagttcctatt
acaaggagaaccatctcaaacctaaccccgctaagacacaggtctgcgcttttcacctgaggaatcgggaggccaaccgtaaactgaagg
tgacatgggagggacaggaactggagcactgtttccaccccaagtatttgggcgtgactctcgatcgcacccttacgtatcggaagcactgc
atgaacactaagcataaggtggcggccagaaataacatcctgcgtaaactcacaggaagcgcctggggcgccgacccacaggtcatccg
taccagtgctctggccctgtctttctccactgctgaatatgcgtgtccggtgtggcacaagtccgcccacgcgaagcaggtggatattgccct
gaacgagacatgccggattatcactggttgcctcaagcctacccccgtcgacaagctctataagttggccggcattgcaccccctgatgtcc
gtcgcgaagtcgcagccaatggcgagcggaaaaaggtagaacactgcgaatcacatccgctgcatggatatcatccccctcccacccgg
cttaagagccgtaagggcttcatgcgcacaaccactccgctggatgtgcctcccgctgccgcgcgcgtgagtctgtgggccgctaagccc
ggtaattccaattggatggcaccgcaagagggcctcccgcccggagccaatcaagagtgggccacatggaagtccttgaacaggctgcg
ctccggtgtgggacgctctaaggacaacctggcccgttggcactatctggaagagtcatccaccctgtgcgactgtggtgctgaacagact
acccagcacatgtacgcttgcccccaatgccctgcctcctgcacggaagaggaactctttaaggcaaccgataacgcagtggcagtggcg
cgcttttggagtaagacaatc

[1105] The mutated CR1-1_PH gene modifying system used in this Example comprises a nucleic acid encoding a mutated CR1-1_PH driver having a nucleic acid sequence of:

(SEQ ID NO: 903)
atgctgtataccatcttcctcgtttatgggatcctgtgttttttctttgtgtatttctgcatctacctgtacatcactgtttatctttgtttt
ctgttctttctgtttctgcttctgtgcggtgacgtggaaagcaatcctggaccaggcagagcccgtggatgtcggttgctgtattgcaacatc
cgcggtctgcatgctaatctggccgagctggactttgttagtcgcggggtggacgtggtctgctgttccgagactctggtggctgggcgtcgc
cacgatgccgagttggccctcgctggcttccagtccccctttcgtaggctctgtggctcaggccctggcttccgtggcatggcggtgtacgtc
aggtctgggttctgtgcctaccggcagagtgtgcacgaatgtgcctgccacgagattatcgtcgttcgcgtgtgtggacgtctgaacaattac
tatctgttctctctctaccgctccccggccaccgatgactccctttacgattgccttctgactgccatggccagcatccagtccactgatccg
aaggcagccttcgtcttcgttggcgacgtaaacgcacatcaccgggactggctgggaagcgcctctccaacagattgtcacggcgtcgccgc
tctggacttttgcaccctttccagctgcgtgcaactcgtccgtgggtccactcatatcgctggaaactgtctggatctggtgatgaccgacgt
gcctgccctgatgaccgtgaccgtcggatccccgattggaagtagcgaccactcccacctggtggtctcactggatctcaaccaggtcgtgcc
tgttgtggatacacgcagggttgtgttcgtgaagagccgcgccaactgggtcgccatcactcgcgctgtgaggactctgccttggggcagatt
atccactccgaggaccctgtaagtgagctcaatgacctgaccgtgtctattctggaacgctttgttcccaagcgcaccatcctcgtgagaagc
cgcgataagccttggttcgatgaccagtgtagactggctttcgaggctaagcaggcggcttaccgtgcttggcgtaggagtcgggaccgcacg
ttgtggcagacctatgtggacaggcgggccgaggccaagcgcgtgtatgaagaggctcagaggcgccttcgccagaggagccgtgaaagcctg
ctcagtattgaccaccctcatcgctggtggtcagagctcaagggctccgtgttcggcgccgaacccagcctgccccctctcgttggtcctggc
ggtggaatcattaccgatcccctcgccagggccgagctgctctccgcacattttgatggaaagcagtcacgcgatgtcatcgccttgccccac
ggttgccacccggagccccgcctcacatctctggccttcaggtccggcgctatcaaggtcctcctggaaggactcgacccctacggtggc
gttgaccccgtcggcatgtttcctctgttttacaagcagctggcggacgtcctggccccaaagttggccgttatctttcgtcggctgatccgc
ctcggcaactttccccgctgctggcgcactggtaatatcactcccatccccaagggccccgtgagtccttacgtggccaattaccgtcccatc
accttgacacctatcctgtctaaggttttcgaaaagctgatcgcaggcaagctgggtcgctttgctgaagtcactggcttgctccctgctggt
cagtttgcttatcgcatcggtctgggctgctgtgacgctctcctgtccgtgagccatcacctgcagtccgccctggactgccgctccgaagcc
cgcctggtgcagctcgatttctccgcagcgtttgaccgcgttaatcacaggggtcttctgtataaattggagtccttcggcgtcgggggccgg
gtgctgtcaattatccgtgatttcgtatccgagcgcacccagtctgtatccgtggacggtgttctgtccgccagcgtcggcgtggttagcgga
gtcccccagggtagcgtgctgggacctctgctctttgtattgtatacgtccgacatgttctctagcctggagaataccctcattaactatgca
gatgactccactttgatggcagttattccggccccacgcctgcgtgacgccgtagcgcagtccctgaatagggacctgtcacgcatcagtgcc
tggtgttcagcttggtccatgaagctgaacgcgtccaagaccaaaagcatgattatctcaaggtccaggactttggtgcctcaacacccccag
ctggagatcgacgatactttgctgcaggagtcctcatccctggaaatcctgggcgtcgtgttcgatgagaagctcaccttcgagcctcacatc
aggcggctggtgagccgcgcgtctaccaagatcgggctgctccgcaaggtgaactccgtgttcggcgattcccaggtcgcgaggcgttgcttt
tacgctttcctgctccctgtgctggagtactgctctccggtatgggcgagtgccgcggatacccatcttcgtcttctggaccgccttgtctcc
agcgccagccgtttgtgtgctgacaacgatctggtgaacctgagtcaccgtcggcgcgtggctgagctgtgtatgttctacaaggtgtacaat
aacgagaggcattggctgtactcatccctgccagccctgaaggtcttcgggcgcgaaacgcgtgccgcgtgcggtgctcactcttttacgttg
gaggcggttcgctgtcgcaccaaccagttctgccgctgctttgtgccttggtctgcgaaggtgtggaacctgctccctgcctccgctttcggg
agaatcggtctgcaggcatttaaaagcgctgtgaacggtttcctgttggactttctg

[1106] The mutated Vingi-1_Acar driver encoded by the nucleic acid sequence has an amino acid sequence of:

Vingi-1_Acar EN (D191A)
(SEQ ID NO: 420)
MDEYQRSLSRPLLTIMSINIEGLSLAKEELLAKMSEDISCDILCIQETHRDITMRRPKILGM
QLAVERPHRQYGSAIFVRSGVAISATSLTEVNNIEILSVELDSCTVSSLYKPPGADFYFTPP
TSCHNHEAHFVVGDFNSHSCVWGYDEDDRNGEAVLTWADNSRMSLLHDSKLPPSFNS
GRWKRGYNPALIFVKESISHQCTKRVLNPIPNTQHRPICCVAYAAVRPKSVPFRRRYNFN
KANWTKFTETLEAAISDIEPSIENYDLFVEAVKRSSRLSIPRGCRTSYLPGLNEESLNQLQ
EYLRLFQENPYSDGTIAAGQKLSTALANAKKDRWIELLENLDMSKSSRKAWQLLRRLD
SDPLVNPGHANVTPDQIAHQLIQNGKTNCSRIKMKINRVPELETHQLSSPLNLKELREAIK
RCKTGKAPGLDDLMMEQIKHLGAKAENWLLKFYNQCLAHKQIPRAWRKTKIIAILKPG
KDASNARNYRPISLLCHLYKVYERMLLNRLGPVIEPKLIAQQAGFRPGKNCTGQILHLTE
HIEEGYEKGCITGTVFVDLTAAYDTVQHRKMLHKVYHITRDFDFTKTVQTLLENRSFYV
EFQGQKSRWRRQKNGLPQGSVLAPTLFNIFTNDQPQPPLTKSFIYADDLGLTTQAKDFET
VEKQLTNALKDLSSYYKENHLKPNPAKTQVCAFHLRNREANRKLKVTWEGQELEHCF
HPKYLGVTLDRTLTYRKHCMNTKHKVAARNNILRKLTGSAWGADPQVIRTSALALSFS
TAEYACPVWHKSAHAKQVDIALNETCRIITGCLKPTPVDKLYKLAGIAPPDVRREVAAN
GERKKVEHCESHPLHGYHPPPTRLKSRKGFMRTTTPLDVPPAAARVSLWAAKPGNSNW
MAPQEGLPPGANQEWATWKSLNRLRSGVGRSKDNLARWHYLEESSTLCDCGAEQTTQ
HMYACPQCPASCTEEELFKATDNAVAVARFWSKTI

[1107] The mutated CR1-1_PH driver encoded by the nucleic acid sequence has an amino acid sequence of:

CR1-1_PH EN (D250A):
(SEQ ID NO: 421)
MLYTIFLVYGILCFFFVYFCIYLYITVYLCFLFFLFLLLCGDVESNPGPGRARGCRLLYCNI
RGLHANLAELDFVSRGVDVVCCSETLVAGRRHDAELALAGFQSPFRRLCGSGPGFRGM
AVYVRSGFCAYRQSVHECACHEIIVVRVCGRLNNYYLFSLYRSPATDDSLYDCLLTAM
ASIQSTDPKAAFVFVGDVNAHHRDWLGSASPTDCHGVAALDFCTLSSCVQLVRGSTHIA
GNCLDLVMTDVPALMTVTVGSPIGSSDHSHLVVSLDLNQVVPVVDTRRVVFVKSRAN
WVAITRAVRTLPWRQIIHSEDPVSELNDLTVSILERFVPKRTILVRSRDKPWFDDQCRLA
FEAKQAAYRAWRRSRDRTLWQTYVDRRAEAKRVYEEAQRRLRQRSRESLLSIDHPHR
WWSELKGSVFGAEPSLPPLVGPGGGIITDPLARAELLSAHFDGKQSRDVIALPHGCHPEP
RLTSLAFRSGAIKVLLEGLDPYGGVDPVGMFPLFYKQLADVLAPKLAVIFRRLIRLGNFP
RCWRTGNITPIPKGPVSPYVANYRPITLTPILSKVFEKLIAGKLGRFAEVTGLLPAGQFAY
RIGLGCCDALLSVSHHLQSALDCRSEARLVQLDFSAAFDRVNHRGLLYKLESFGVGGRV
LSIIRDFVSERTQSVSVDGVLSASVGVVSGVPQGSVLGPLLFVLYTSDMFSSLENTLINYA
DDSTLMAVIPAPRLRDAVAQSLNRDLSRISAWCSAWSMKLNASKTKSMIISRSRTLVPQ
HPQLEIDDTLLQESSSLEILGVVFDEKLTFEPHIRRLVSRASTKIGLLRKVNSVFGDSQVA
RRCFYAFLLPVLEYCSPVWASAADTHLRLLDRLVSSASRLCADNDLVNLSHRRRVAELC
MFYKVYNNERHWLYSSLPALKVFGRETRAACGAHSFTLEAVRCRTNQFCRCFVPWSA
KVWNLLPASAFGRIGLQAFKSAVNGFLLDFL

[1108] Both the wild type and the mutated Vingi-1_Acar gene modifying system further comprises a template plasmid containing a transgene with a sequence of:

(SEQ ID NO: 1001)
gggggacacggaaagagcctccccgaagattgagtgaattcagtcgggcgtcccctgggcaacgtttcttgtaagcggccgatctttccac
cccaaaagcattggatgagtttacggatccgaattctcgacggatcgatccgaacaaacgacccaacacccgtgcgttttattctgtcttttta
ttgccgatcccccggccgctttacttgtacagctcgtccatgccgagagtgatcccggcggcggtcacgaactccagcaggaccatgtgatc
gcgcttctcgttggggtctttgctcagggcggactgggtgctcaggtaagtatcaaggttacaagacaggtttaaggagaccaatagaaact
gggcttgtcgagacagagaagactcttgcgtttctgataggcacctattggtcttactgacatccactttgcctttctctccacaggtagtggt
tgtcgggcagcagcacggggccgtcgccgatgggggtgttctgctggtagtggtcggcgagctgcacgctgccgtcctcgatgttgtggcgg
atcttgaagttcaccttgatgccgttcttctgcttgtcggccatgatatagacgttgtggctgttgtagttgtactccagcttgtgccccagga
tgttgccgtcctccttgaagtcgatgcccttcagctcgatgcggttcaccagggtgtcgccctcgaacttcacctcggcgcgggtcttgtagtt
gccgtcgtccttgaagaagatggtgcgctcctggacgtagccttcgggcatggcggacttgaagaagtcgtgctgcttcatgtggtcggggtag
cggctgaagcactgcacgccgtaggtcagggtggtcacgagggtgggccagggcacgggcagcttgccggtggtgcagatgaacttcag
ggtcagcttgccgtaggtggcatcgccctcgccctcgccggacacgctgaacttgtggccgtttacgtcgccgtccagctcgaccaggatg
ggcaccaccccggtgaacagctcctcgcccttgctcaccatggtggctttaccaacagtaccggaatgccaagcttgggtcctgtgttctgg
cggcaaacccgttgcgaaaaagaacgttcacggcgactactgcacttatatacggttctcccccaccctcgggaaaaaggcggagccagt
acacgacatcactttcccagtttaccccgcgccaccttctctaggcaccggatcaattgccgacccctccccccaacttctcggggactgtgg
gcgatgtgcgctctgccctagttgcttgtgatttcttttcttttttattttatttccattatttgaaatgtatttgttgtagcaatgctttt
gacacgaaataaataaa

[1109] In SEQ ID NO: 1001, the underlined sequences indicate, from 5′ to 3′, the 5′ UTR, GFPai, EF1 alpha (each with single underline), and 3′ UTR (with double underline).

[1110] Both the wild-type and the mutated CR1-1_PH gene modifying system further comprises a template plasmid containing a transgene with a sequence of:

(SEQ ID NO: 1002)
gcgtggcctgcgcgttatcaggccgcccccattgtccggccaccggacgcctctttgtttgtatgagctggctttgggtttggggctctgggt
agcccctgagttggaggaaatgccactctaaaggcggatgagacctcttttggtccaacggcatccctgagaggagatgaacaggctggt
gccatagctgggtactcagtcttccgcagtctgctcctctctctcttccatcaggtagtaccacctgatgctcttttcctttcctttctcttct
tcttcttttcggccaaagcctgtactggtgatggcagggtctggggcgcgtagatagctggccgctttcgtagctatcgttactgtcgatttgt
ttttgctttattgtttacggatccgaattctcgacggatcgatccgaacaaacgacccaacacccgtgcgttttattctgtctttttattgccg
atcccccggccgctttacttgtacagctcgtccatgccgagagtgatcccggcggcggtcacgaactccagcaggaccatgtgatcgcgcttct
cgttggggtctttgctcagggcggactggctgctcaggtaagtatcaaggttacaagacaggtttaaggagaccaatagaaactgggcttgtcg
agacagagaagactcttgcgtttctgataggcacctattggtcttactgacatccactttgcctttctctccacaggtagtggttgtcgggcag
cagcacggggccgtcgccgatgggggtgttctgctggtagtggtcggcgagctgcacgctgccgtcctcgatgttgtggcggatcttgaagttc
accttgatgccgttcttctgcttgtcggccatgatatagacgttgtggctgttgtagttgtactccagcttgtgccccaggatgttgccgtcct
ccttgaagtcgatgcccttcagctcgatgcggttcaccagggtgtcgccctcgaacttcacctcggcgcgggtcttgtagttgccgtcgtcctt
gaagaagatggtgcgctcctggacgtagccttcgggcatggcggacttgaagaagtcgtgctgcttcatgtggtcggggtagcggctgaagcac
tgcacgccgtaggtcagggtggtcacgagggtgggccagggcacgggcagcttgccggtggtgcagatgaacttcagggtcagcttgccgta
ggtggcatcgccctcgccctcgccggacacgctgaacttgtggccgtttacgtcgccgtccagctcgaccaggatgggcaccaccccggt
gaacagctcctcgcccttgctcaccatggtggctttaccaacagtaccggaatgccaagcttgggtcctgtgttctggcggcaaacccgttgc
gaaaaagaacgttcacggcgactactgcacttatatacggttctcccccaccctcgggaaaaaggcggagccagtacacgacatcactttc
ccagtttaccccgcgccaccttctctaggcaccggatcaattgccgacccctccccccaacttctcggggactgtgggcgatgtgcgctctg
ccctagcagcgttttgggcttcccggtgttccaagatgcttcatttgggttgtattacctgtccgtgggagctcaagcgtgaagtttta
ataataataataa

[1111] In SEQ ID NO: 1002, the underlined sequences indicate, from 5′ to 3′, the 5′ UTR, GFPai, EF1 alpha (each with single underline), and 3′ UTR (with double underline).

[1112] Briefly, the template RNA encoded by the plasmid comprises the following sequences from 5′ to 3′: 5′UTR, GFPai reporter driven by EF1-alpha promoter, and 3′ UTR.

[1113] U2OS cells were transfected with both a driver and a transgene plasmid using a Lonza nucleofection system. 250 ng of DNA/400,000 cells in a ratio of 2:1 transgene to driver plasmid was used. Cells were plated in a 24 well plate and then incubated at 37C, 5% CO2 for 3 days. Two sets of three bio-replicates for each combination of driver:transgene plasmids and controls were prepared.

[1114] The first set of replicates was subjected to ddPCR analysis to detect integration events. Integration was assessed using the following methodology on day 3 following nucleofection: genomic DNA extraction was performed followed by ddPCR analysis to identify copies of DNA spanning the reverse transcribed and integrated GFPai splice site junction. The second set of replicates was processed for flow cytometry analysis to measure GFP activity.

[1115] As shown in FIG. 5, integration was observed in cells that were treated with gene modifying systems comprising a wild type Vingi-1_Acar or CR1-1_PH driver, while those treated with a mutated Vingi-1_Acar or CR1-1_PH driver demonstrated background levels of integration as measured via flow cytometry as an indicator of transgene expression or quantifying integrated DNA by ddPCR. These results demonstrate that endonuclease activity contributes to integration of a heterologous object sequence using gene modifying systems. Furthermore, these data show that a genome editing system including the D191A or D250A mutant driver shows near background levels of integration activity.

### Example 5: Gene Editing of Primary Human T Cells with a BCMA CAR by a Retrotransposon-Based Gene Modifying System Results in CART Cells that can Kill Target Tumor Cells

[1116] This example demonstrates that gene modifying systems may be used to introduce a chimeric antigen receptor (CAR) molecule into the genome into primary human T cells. The resultant CART cell can kill target tumor cells at least as well as a control CART cell derived from a Lentivirus.

[1117] The gene modifying system used in this Example comprises a nucleic acid encoding Vingi-1_Acar driver having a nucleic acid sequence of:

(SEQ ID NO: 904)
atggacgagtaccagcgctccttgtcccgccccctgttgacaatcatgagtattaatatcgaaggcttgagcctcgcgaaagaggaactgctt
gccaagatgtccgaggacatcagctgcgacattctgtgcatccaagagacccatcgcgacatcaccatgcgtcgccccaagatcctcggta
tgcagcttgcggtggagcgccctcaccgccagtacggctccgcgattttcgtgcgttccggtgtggccatttctgctaccagcctcaccgag
gttaacaatattgagatcctgtcagtggagctcgattcctgtaccgtctccagtctgtacaaacctcccggtgcagacttctactttactcccc
cgacgtcttgccacaaccatgaggctcattttgtggttggtgatttcaattcccactcctgcgtgtggggctatgacgaggatgaccgcaacgg
cgaagctgttctgacctgggccgataattcccgcatgtccctgctccacgatagtaagctgcctccctccttcaacagtgggagatggaagcg
cgggtacaaccctgatcttatcttcgtcaaagaatccatctctcatcagtgtaccaagcgcgtcctcaacccgattcctaacactcagcaccgc
cccatttgttgcgtagcatatgctgccgtgcgtcccaagtctgtccccttcagaaggagatacaacttcaacaaggctaactggaccaagttta
ccgaaaccttggaagcggcaatctccgacattgagccatctatcgagaattatgatctcttcgttgaggcagtcaagcggtcctctcgcctga
gtatcccccgtggatgtaggacctcctacctgcccggcctgaacgaagagtcactcaatcagctgcaggaatacctgcgcctgttccaaga
gaatccttactccgatggcaccatcgctgccggacaaaaactgagcaccgctctggcgaatgctaagaaagaccgctggatcgagctgct
cgagaacctggacatgtccaagtctagccggaaagcttggcagctcctgcgccggctggacagcgaccccctcgtgaatcctggccatgc
caatgtaacgccggaccagatcgcccatcaactgatccagaacggcaagaccaattgcagtagaatcaagatgaagatcaacagagtacc
cgagttggaaacacaccagctgtctagtcctctcaacctcaaagagctccgcgaagcaatcaaaaggtgtaagacgggcaaagctcccgg
tctggatgacctgatgatggaacagatcaaacacttgggggccaaggctgagaactggttgctgaaattctacaaccagtgcctggctcaca
agcagatcccccgtgcgtggcgcaagactaagattatcgccatcttgaagccgggcaaggatgctagtaacgcccgcaactaccgtcctat
ttccctcctgtgtcacctttacaaggtgtacgagcgcatgctcctgaaccgcttgggccccgtcatcgagcctaaactgatcgcccaacaggc
tggtttccgcccaggtaagaactgcactggacagatcctgcaccttacggagcacatcgaggaaggttacgagaagggctgcatcaccgg
aaccgtcttcgtggacctgactgcggcctacgacacggttcagcacagaaaaatgctccacaaggtatatcatattacccgggatttcgactt
caccaaaacagtgcagacgcttctggagaatcgctccttttacgtcgagttccagggtcagaaaagtcggtggaggcgccagaagaacgg
cttgccccagggtagcgtgctcgccccaaccctgtttaatatcttcaccaacgaccagccacagcccccgctgacaaaatcctttatctatgc
cgacgatcttggcctgaccacgcaagccaaggactttgagacagtcgagaaacagctcacaaacgcactcaaggacctgagttcctattac
aaggagaaccatctcaaacctaaccccgctaagacacaggtctgcgcttttcacctgaggaatcgggaggccaaccgtaaactgaaggtg
acatgggagggacaggaactggagcactgtttccaccccaagtatttgggcgtgactctcgatcgcacccttacgtatcggaagcactgcat
gaacactaagcataaggtggcggccagaaataacatcctgcgtaaactcacaggaagcgcctggggcgccgacccacaggtcatccgta
ccagtgctctggccctgtctttctccactgctgaatatgcgtgtccggtgtggcacaagtccgcccacgcgaagcaggtggatattgccctga
acgagacatgccggattatcactggttgcctcaagcctacccccgtcgacaagctctataagttggccggcattgcaccccctgatgtccgtc
gcgaagtcgcagccaatggcgagcggaaaaaggtagaacactgcgaatcacatccgctgcatggatatcatccccctcccacccggctta
agagccgtaagggcttcatgcgcacaaccactccgctggatgtgcctcccgctgccgcgcgcgtgagtctgtgggccgctaagcccggta
attccaattggatggcaccgcaagagggcctcccgcccggagccaatcaagagtgggccacatggaagtccttgaacaggctgcgctcc
ggtgtgggacgctctaaggacaacctggcccgttggcactatctggaagagtcatccaccctgtgcgactgtggtgctgaacagactaccc
agcacatgtacgcttgcccccaatgccctgcctcctgcacggaagaggaactctttaaggcaaccgataacgcagtggcagtggcgcgctt
ttggagtaagacaatcggcggcggctcccccaagaagaagcggaaggtgagcggcagcgagactcccgggacctcagagtccgccac
acccgaaagtgtgagcggctggcggctgttcaagaagattagc

[1118] The gene modifying system used in this Example comprises a nucleic acid encoding 3GS Linker having a nucleic acid sequence of:

(SEQ ID NO: 15437)
ggcggcggctcc

[1119] The gene modifying system used in this Example comprises a nucleic acid encoding an SV40 NLS having a nucleic acid sequence of:

(SEQ ID NO: 15438)
cccaagaagaagcggaaggtg

[1120] The gene modifying system used in this Example comprises a nucleic acid encoding an XTEN linker having a nucleic acid sequence of:

(SEQ ID NO: 15439)
agcggcagcgagactcccgggacctcagagtccgccacacccgaaagt

[1121] The gene modifying system used in this Example comprises a nucleic acid encoding an HiBit tag having a nucleic acid sequence of:

(SEQ ID NO: 15440)
gtgagcggctggcggctgttcaagaagattagc

[1122] The Vingi-1_Acar driver encoded by the nucleic acid has an amino acid sequence of:

(SEQ ID NO: 405)
MDEYQRSLSRPLLTIMSINIEGLSLAKEELLAKMSEDISCDILCIQETHRDITMRRPKILGM
QLAVERPHRQYGSAIFVRSGVAISATSLTEVNNIEILSVELDSCTVSSLYKPPGADFYFTPP
TSCHNHEAHFVVGDFNSHSCVWGYDEDDRNGEAVLTWADNSRMSLLHDSKLPPSFNS
GRWKRGYNPDLIFVKESISHQCTKRVLNPIPNTQHRPICCVAYAAVRPKSVPFRRRYNFN
KANWTKFTETLEAAISDIEPSIENYDLFVEAVKRSSRLSIPRGCRTSYLPGLNEESLNQLQ
EYLRLFQENPYSDGTIAAGQKLSTALANAKKDRWIELLENLDMSKSSRKAWQLLRRLD
SDPLVNPGHANVTPDQIAHQLIQNGKTNCSRIKMKINRVPELETHQLSSPLNLKELREAIK
RCKTGKAPGLDDLMMEQIKHLGAKAENWLLKFYNQCLAHKQIPRAWRKTKIIAILKPG
KDASNARNYRPISLLCHLYKVYERMLLNRLGPVIEPKLIAQQAGFRPGKNCTGQILHLTE
HIEEGYEKGCITGTVFVDLTAAYDTVQHRKMLHKVYHITRDFDFTKTVQTLLENRSFYV
EFQGQKSRWRRQKNGLPQGSVLAPTLFNIFTNDQPQPPLTKSFIYADDLGLTTQAKDFET
VEKQLTNALKDLSSYYKENHLKPNPAKTQVCAFHLRNREANRKLKVTWEGQELEHCF
HPKYLGVTLDRTLTYRKHCMNTKHKVAARNNILRKLTGSAWGADPQVIRTSALALSFS
TAEYACPVWHKSAHAKQVDIALNETCRIITGCLKPTPVDKLYKLAGIAPPDVRREVAAN
GERKKVEHCESHPLHGYHPPPTRLKSRKGFMRTTTPLDVPPAAARVSLWAAKPGNSNW
MAPQEGLPPGANQEWATWKSLNRLRSGVGRSKDNLARWHYLEESSTLCDCGAEQTTQ
HMYACPQCPASCTEEELFKATDNAVAVARFWSKTI

[1123] The gene modifying system used in this Example comprises a nucleic acid encoding 3GS (SEQ ID NO: 15441) Linker has an amino acid sequence of:

(SEQ ID NO: 15442)
GGGS

[1124] The gene modifying system used in this Example comprises a nucleic acid encoding an SV40 NLS has an amino acid sequence of:

(SEQ ID NO: 345)
PKKKRKV

[1125] The gene modifying system used in this Example comprises a nucleic acid encoding an XTEN linker has an amino acid sequence of:

(SEQ ID NO: 220)
SGSETPGTSESATPES

[1126] The gene modifying system used in this Example comprises a nucleic acid encoding an HiBit tag has an amino acid sequence of:

(SEQ ID NO: 15443)
VSGWRLFKKIS

[1127] The Vingi-1_Acar gene modifying system further comprises an RNA that serves as a template for encoding a BCMA-CAR-T2A-GFP comprising a nucleic acid sequence of:

(SEQ ID NO: 1003)
atggctctgccggtgaccgccctgcttctgcctcttgccctgctcttgcatgccgctcgcccgcaggtgcagcttgttcagtccggcgcgga
ggtaaaaaagcctggcgccagcgtgaaagtgagctgtaaggcttccggctacagcttcccagattactatatcaattgggtgcggcaggct
cccgggcagggactcgagtggatgggttggatctattttgcgagcggaaactctgagtacaaccagaagttcaccggcagggttaccatga
cccgcgacacgtcaagttctacggcatacatggagctgtctagtctcaggtccgaagataccgccgtgtatttctgcgcctccctgtatgatta
tgactggtacttcgacgtctggggccagggcaccatggtgacagtgtcttccggtggcggtggctccggcggaggtggctctggagggg
gtggcagcgatatcgtgatgacccagactccactgtctctgtctgtgacccctggtgagccggcgagcatctcctgcaagagttcccagagt
ctggtccactctaacggcaacacctacctgcactggtatctgcagaagccgggccaaagtccacagctcctgatctacaaggtttccaaccg
tttcagcggggtcccggatcgcttttccggctcaggtagcggtgccgatttcaccctgaagattagtcgggtcgaggctgaggacgtcggc
gtctactattgtgcagagaccagtcacgtcccctggactttcggtcaggggaccaaactggagatcaagaccacaacacctgctccaaggc
cccccacacccgctccaactatagccagccaaccattgagcctcagacctgaagcttgcaggcccgcagcaggaggcgccgtccatacg
cgaggcctggacttcgcgtgtgatatttatatttgggcccctttggccggaacatgtggggtgttgcttctctcccttgtgatcactctgtatt
gtaggagtaagaggagcaggctcctgcacagtgactacatgaacatgactccccgccgccccgggcccacccgcaagcattaccagccctat
gccccaccacgcgacttgcagcctatcgctccagggtgaaattttctagaagcgccgatgctcccgcatatcagcagggtcagaatcagc
tctacaatgaattgaatctcggcaggcgagaagagtacgatgttctggacaagagacggggcagggatcccgagatggggggaaagccc
cggagaaaaaatcctcaggaggggttgtacaatgagctgcagaaggacaagatggctgaagcctatagcgagatcggaatgaaaggcg
aaagacgcagaggcaaggggcatgacggtctgtaccagggtctctctacagccaccaaggacacttatgatgcgttgcatatgcaagcctt
gccaccccgcggaagtggtgagggcagaggaagtcttctaacatgcggtgacgtggaggagaatcccggccctatgcttctcctggtgac
aagccttctgctctgtgagttaccacacccagcattcctcctgatcccacgcaaagtgtgtaacggaataggtattggtgaatttaaagactca
ctctccataaatgctacgaatattaaacacttcaaaaactgcacctccatcagtggcgatctccacatcctgccggtggcatttaggggtgact
ccttcacacatactcctcctctggatccacaggaactggatattctgaaaaccgtaaaggaaatcacagggtttttgctgattcaggcttggcct
gaaaacaggacggacctccatgcctttgagaacctagaaatcatacgcggcaggaccaagcaacatggtcagttttctcttgcagtcgtcag
cctgaacataacatccttgggattacgctccctcaaggagataagtgatggagatgtgataatttcaggaaacaaaaatttgtgctatgcaaat
acaataaactggaaaaaactgtttgggacctccggtcagaaaaccaaaattataagcaacagaggtgaaaacagctgcaaggccacaggc
caggtctgccatgccttgtgctcccccgagggctgctggggcccggagcccagggactgcgtctcttgccggaatgtcagccgaggcag
ggaatgcgtggacaagtgcaaccttctggagggtgagccaagggagtttgtggagaactctgagtgcatacagtgccacccagagtgcct
gcctcaggccatgaacatcacctgcacaggacggggaccagacaactgtatccagtgtgcccactacattgacggcccccactgcgtcaa
gacctgcccggcaggagtcatgggagaaaacaacaccctggtctggaagtacgcagacgccggccatgtgtgccacctgtgccatccaa
actgcacctacggatgcactgggccaggtcttgaaggctgtccaacgaatgggcctaagatcccgtccatcgccactgggatggtggggg
ccctcctcttgctgctggtggtggccctggggatcggcctcttcatg

[1128] The gene modifying system used in this Example comprises a nucleic acid encoding a CD8 hinge domain having a nucleic acid sequence of:

(SEQ ID NO: 15444)
accacaacacctgctccaaggccccccacacccgctccaactatagcca
gccaaccattgagcctcagacctgaagcttgcaggcccgcagcaggagg
cgccgtccatacgcgaggcctggacttcgcgtgtgat

The gene modifying system used in this Example comprises a nucleic acid encoding a CD8 transmembrane domain having a nucleic acid sequence of:

(SEQ ID NO: 15445)
atttatatttgggcccctttggccggaacatgtggggtgttgcttctct
cccttgtgatcactctgtattgt

[1129] The gene modifying system used in this Example comprises a nucleic acid encoding a CD28 co-stimulatory domain having a nucleic acid sequence of:

(SEQ ID NO: 15446)
aggagtaagaggagcaggctcctgcacagtgactacatgaacatgactc
cccgccgccccgggcccacccgcaagcattaccagccctatgccccacc
acgcgacttcgcagcctatcgctcc

[1130] The gene modifying system used in this Example comprises a nucleic acid encoding a CD3z signaling domain having a nucleic acid sequence of:

(SEQ ID NO: 15447)
agggtgaaattttctagaagcgccgatgctcccgcatatcagcagggtc
agaatcagctctacaatgaattgaatctcggcaggcgagaagagtacga
tgttctggacaagagacggggcagggatcccgagatggggggaaagccc
cggagaaaaaatcctcaggaggggttgtacaatgagctgcagaaggaca
agatggctgaagcctatagcgagatcggaatgaaaggcgaaagacgcag
aggcaaggggcatgacggtctgtaccagggtctctctacagccaccaag
gacacttatgatgcgttgcatatgcaagccttgccaccccgc

[1131] The gene modifying system used in this Example comprises a nucleic acid encoding a GSG Linker having a nucleic acid sequence of:

ggaagtggt

[1132] The gene modifying system used in this Example comprises a nucleic acid encoding a T2A peptide having a nucleic acid sequence of:

(SEQ ID NO: 15448)
gagggcagaggaagtcttctaacatgcggtgacgtggaggagaatcccg
gccct

[1133] The gene modifying system used in this Example comprises a nucleic acid encoding a GFP protein having a nucleic acid sequence of:

(SEQ ID NO: 1004)
Atggtgagcaagggcgaggagctgttcaccggggtggtgcccatcctggtcgagctggacggcgacgtaaacggccacaagttcagcg
tgtccggcgagggcgagggcgatgccacctacggcaagctgaccctgaagttcatctgcaccaccggcaagctgcccgtgccctggccc
accctcgtgaccaccctgacctacggcgtgcagtgcttcagccgctaccccgaccacatgaagcagcacgacttcttcaagtccgccatgc
ccgaaggctacgtccaggagcgcaccatcttcttcaaggacgacggcaactacaagacccgcgccgaggtgaagttcgagggcgacac
cctggtgaaccgcatcgagctgaagggcatcgacttcaaggaggacggcaacatcctggggcacaagctggagtacaactacaacagcc
acaacgtctatatcatggccgacaagcagaagaacggcatcaaggtgaacttcaagatccgccacaacatcgaggacggcagcgtgcag
ctcgccgaccactaccagcagaacacccccatcggcgacggccccgtgctgctgcccgacaaccactacctgagcacccagtccgccct
gagcaaagaccccaacgagaagcgcgatcacatggtcctgctggagttcgtgaccgccgccgggatcactctcggcatggacgagctgt
acaag

[1134] The Vingi-1_Acar gene modifying system further comprises an RNA that serves as a template for encoding a BCMA-CAR-T2A-GFP comprising a protein sequence of:

(SEQ ID NO: 1100)
MALPVTALLLPLALLLHAARPQVQLVQSGAEVKKPGASVKVSCKASGYS
FPDYYINWVRQAPGQGLEWMGWIYFASGNSEYNQKFTGRVTMTRDTSSS
TAYMELSSLRSEDTAVYFCASLYDYDWYFDVWGQGTMVTVSSGGGGSGG
GGSGGGGSDIVMTQTPLSLSVTPGEPASISCKSSQSLVHSNGNTYLHWY
LQKPGQSPQLLIYKVSNRFSGVPDRFSGSGSGADFTLKISRVEAEDVGV
YYCAETSHVPWTFGQGTKLEIKTTTPAPRPPTPAPTIASQPLSLRPEAC
RPAAGGAVHTRGLDFACDIYIWAPLAGTCGVLLLSLVITLYCRSKRSRL
LHSDYMNMTPRRPGPTRKHYQPYAPPRDFAAYRSRVKFSRSADAPAYQQ
GQNQLYNELNLGRREEYDVLDKRRGRDPEMGGKPRRKNPQEGLYNELQK
DKMAEAYSEIGMKGERRRGKGHDGLYQGLSTATKDTYDALHMQALPPRG
SGEGRGSLLTCGDVEENPGPMLLLVTSLLLCELPHPAFLLIPRKVCNGI
GIGEFKDSLSINATNIKHFKNCTSISGDLHILPVAFRGDSFTHTPPLDP
QELDILKTVKEITGFLLIQAWPENRTDLHAFENLEIIRGRTKQHGQFSL
AVVSLNITSLGLRSLKEISDGDVIISGNKNLCYANTINWKKLFGTSGQK
TKIISNRGENSCKATGQVCHALCSPEGCWGPEPRDCVSCRNVSRGRECV
DKCNLLEGEPREFVENSECIQCHPECLPQAMNITCTGRGPDNCIQCAHY
IDGPHCVKTCPAGVMGENNTLVWKYADAGHVCHLCHPNCTYGCTGPGLE
GCPTNGPKIPSIATGMVGALLLLLVVALGIGLFM

[1135] The gene modifying system used in this Example comprises a nucleic acid encoding a CD8 hinge domain having a protein sequence of:

(SEQ ID NO: 1101)
TTTPAPRPPTPAPTIASQPLSLRPEACRPAAGGAVHTRGLDFACD

[1136] The gene modifying system used in this Example comprises a nucleic acid encoding a CD8 transmembrane domain having a protein sequence of:

(SEQ ID NO: 1102)
IYIWAPLAGTCGVLLLSLVITLYC

[1137] The gene modifying system used in this Example comprises a nucleic acid encoding a CD28 co-stimulatory domain having a protein sequence of:

(SEQ ID NO: 1103)
RSKRSRLLHSDYMNMTPRRPGPTRKHYQPYAPPRDFAAYRS

[1138] The gene modifying system used in this Example comprises a nucleic acid encoding a CD3z signaling domain having a protein sequence of:

(SEQ ID NO: 1104)
RVKFSRSADAPAYQQGQNQLYNELNLGRREEYDVLDKRRGRDPEMGGK
PRRKNPQEGLYNELQKDKMAEAYSEIGMKGERRRGKGHDGLYQGLSTA
TKDTYDALHMQALPPR

[1139] The gene modifying system used in this Example comprises a nucleic acid encoding a GSG Linker having a protein sequence of:

GSG

[1140] The gene modifying system used in this Example comprises a nucleic acid encoding a T2A peptide having a protein sequence of:

(SEQ ID NO: 1106)
EGRGSLLTCGDVEENPGP

[1141] The gene modifying system used in this Example comprises a nucleic acid encoding a GFP protein having a protein sequence of:

(SEQ ID NO: 1107)
MVSKGEELFTGVVPILVELDGDVNGHKFSVSGEGEGDATYGKLTLKFIC
TTGKLPVPWPTLVTTLTYGVQCFSRYPDHMKQHDFFKSAMPEGYVQERT
IFFKDDGNYKTRAEVKFEGDTLVNRIELKGIDFKEDGNILGHKLEYNYN
SHNVYIMADKQKNGIKVNFKIRHNIEDGSVQLADHYQQNTPIGDGPVLL
PDNHYLSTQSALSKDPNEKRDHMVLLEFVTAAGITLGMDELYK

[1142] Briefly, the template RNA for use with the Vingi-1_Acar gene modifying system comprises the following sequences from 5′ to 3′: 5′ UTR, bGHpA, WPRE, BCMA-CAR-T2A-GFP, Kozak sequence, MND promoter, 3′ UTR.

[1143] The Vingi-1_Acar gene modifying system and BCMA-CAR-T2A-GFP template RNA was introduced into primary human T cells. Briefly, a vial of human T cells stored at liquid nitrogen from one donor was thawed and placed into culture media containing TexMACS supplemented with 5% human serum albumin. Twenty-four hours after thaw, T cells were activated by supplementing the culture media with TransACT (according to manufacturer's protocol; Miltenyi) IL2 (20 IU/mL; Miltenyi), IL7 (10 ng/mL; Miltenyi), and IL15 (5 ng/mL; Miltenyi) for two days. Cells were counted daily to ensure viability above 80%.

[1144] On the second day of T cell activation, T cells were either electroporated with Vingi-1_Acar and CAR RNA or transduced with a Lentivirus encoding the same CAR. As a control, just the CAR template was electroporated into T cells. For the electroporation, a total of 50 million T cells were electroporated with 500 μg/mL of RNA (mass ratio of 2 template:1 driver) in a volume of 400 uLs of OptiMEM. Electroporations were quenched in 400 uLs of OptiMEM for ten minutes at 37C followed by addition expansion media (TexMACS, 10 ng/mL of IL7, 5 ng/mL of IL15, 5% human serum albumin). Electroporated T cells were expanded and analyzed by flow cytometry CAR and GFP expression for 5, 7, and 9 days.

[1145] As a comparison, the same BCMA-CAR-T2A-GFP molecule was introduced into donor matched T cells using a lentiviral gene delivery system as follows. After two days of T cell activation, a Lentiviral vector encoding BCMA-CAR-T2A-GFP was diluted ten-fold and added to T cells without serum for 24 hours and then replaced with expansion culture media (TexMACS, 10 ng/mL of IL7, 5 ng/mL of IL15, 5% human serum albumin).

[1146] On day 9 of the experiment 100 million GFP+/CAR+ cells were sorted and enriched from Vingi-1_Acar-edited cells. Expression of GFP+ cells in this population was 0.5% and sorting enriched the GFP fraction to 50% of the total T cell population. Lentiviral transduction yielded 10% GFP+/CAR+ cells and to equilibrate cell numbers for the cytotoxicity assay, Vingi-1 Acar-edited CART cells were back-diluted with donor matched non-electroporated control cells.

[1147] BCMA-CART cells were then co-cultured for 24 hours with BCMA-positive tumor cells (H929) at various T cell to tumor ratios. Both tumor cells and CART cells were then counted by flow cytometry and killing percentages assessed by this equation: % Killing=1−(number of target cells/number of target cells in control)*100.

[1148] As shown in FIGS. 6A-6C, successful expression of the CAR molecule into the T cells was achieved using the gene modifying system. More specifically, at the lowest ratio of CAR:tumor cells, the gene modifying system resulted in 30% killing compared to 10% cell killing by lentivirus-produced cells. At an intermediate ratio of CAR:tumor cells, the gene modifying system resulted in 45% killing compared to 20% cell killing by lentivirus-produced cells. At the highest ratio of CAR:tumor cells, the gene modifying system resulted in 60% killing compared to 35% cell killing by lentivirus-produced cells. This data indicates that BCMA-CART cells derived from the Vingi-1_Acar gene modifying system are at least as effective as Lentiviral derived CART cells in the functional capacity to kill tumor cells.

### Example 6: Gene Editing of Primary Human T Cells with a BCMA CAR by a Retrotransposon-Based Gene Modifying System Results in CART Cells that can Kill Target Tumor Cells

[1149] This example demonstrates that exemplary gene modifying systems may be used to introduce a chimeric antigen receptor (CAR) molecule into the genome into primary human T cells. The resultant CART cell can kill target tumor cells.

[1150] The gene modifying system used in this Example comprised a nucleic acid encoding an exemplary RTE1_MD gene modifying polypeptide comprising an amino acid sequence of:

(SEQ ID NO: 402)
MDSTAHPNQGRGLEKVSQTLPALQTPGQHTAAGGSSPLSGRNQRKNTKK
LLLGAWNIRTLLDRENTPRPERRTALIGKELARYNIDIAALSETRLPEE
GSLSEPTTGYTFFWKGRASNEDRIHGVGLAIKTSLLKQLPDLPVGISER
LMKIRLPLSKDRYATIISAYAPTLTSTEETIEQFYSDLSAVLHSVPTND
KLILLGDFNARVGQDHERWKGVLGKHGVGKMNNNGLLLLSKCSEFELTI
TNTVFRMANKYKTTWMHPRSKQWHLIDYIIVRRRDIQDVKITRAMRGAE
CWTDHRLVRATLQMRIAPRHPKRAQTVRAFYNVSRLRDPSYLQTFQSCL
DDKLSAKGPLTGSSTEKWNQFRDAVKETSKAVLGPKQRNHQDWFDENNT
AIEDLLSKKNKAFMEWQNNPNSAPKKDRFKSLQATAQREIRKMQDRWWE
KKAEEIQRFADMKNYKQFFSALKTVYGPLKPTTTPLLSSDGDTLIKDKK
GISNRWKEHFSQLLNRPSSVDQSALDQIPQNRTIEQLDVPPSIEEVQKA
IKQMSAGKAPGKDGIPTEVYKALNGKALQAFHIVLTSIWEEEDMPPELR
DASIVALYKNKGSRAACDNYRGISLLSTAGKILARVILNRLLSSVSEQN
LPESQCGFRPDRSTIDMVFTVRQMQEKCLEQNLSLYIVFIDLTKAFDTV
NRDALWVILSKLGCPAKFVKLIQLFHVDMTGEVLSGGETSDRFNISNGV
KQGCVLAPVLFNLFFTQVLRHAVMDLDLGVYIKYRLDGSLFDLRRLTAK
TKTTERLILEALFADDCALMAHQENHLQTIVDRFSTATKLFGLTISLSK
TEVLFQPAPGRPTNQPCITIDGTQLSNVNTFKYLGSTIANDGSLDHEIN
ARIQKASQALGRLRCKVLQHRGVSTATKLKVYNAVVLSSLLYGCETWTL
YRKHMKQLEQFHQRSLRSIMRIRWQDRITNQEVLDRANSTSIEVMVLKT
QLRWSGHVIRMDPQRIPRQVFYGELSAGLRKQGRPKKRFKDQLKSNLKW
AGITPKQLELAASDRSSWRTHINHAATTFEDERRRRLAAARERRHQATT
APPVTTGVPCPMCHKLCASAFGLQSHMRVHRR

[1151] The gene modifying polypeptide comprised a 3GS (SEQ ID NO: 15441) Linker having an amino acid sequence of:

(SEQ ID NO: 15442)
GGGS

[1152] The gene modifying polypeptide comprised an SV40 NLS having an amino acid sequence of:

(SEQ ID NO: 345)
PKKKRKV

[1153] The gene modifying polypeptide comprised an XTEN linker having an amino acid sequence of:

(SEQ ID NO: 220)
SGSETPGTSESATPES

[1154] The gene modifying polypeptide used in this Example comprised an HiBit tag having an amino acid sequence of:

(SEQ ID NO: 15443)
VSGWRLFKKIS

[1155] The gene modifying system further comprised a template RNA that encoded a BCMA-CAR fusion polypeptide, the template RNA comprising a nucleic acid sequence of:

(SEQ ID NO: 15449)
ccggcgcggagguaaaaaagccuggcgccagcgugaaagugagcuguaaggcuuccggcuacagcuucccagauuacuauau
caauugggugcggcaggcucccgggcagggacucgaguggauggguuggaucuauuuuggagcggaaacucugaguacaa
ccagaaguucaccggcaggguuaccaugacccgcgacacgucaaguucuacggcauacauggagcugucuagucucaggucc
gaagauaccgccguguauuucugcgccucccuguaugauuaugacugguacuucgacgucuggggccagggcaccaugguga
cagugucuuccggugggguggcuccggggagguggcucuggaggggguggcagcgauaucgugaugacccagacuccac
ugucucugucugugaccccuggugagccggcgagcaucuccugcaagaguucccagagucugguccacucuaacggcaacac
cuaccugcacugguaucugcagaagccgggccaaaguccacagcuccugaucuacaagguuuccaaccguuucagcggggucc
cggaucgcuuuuccggcucagguagcggugccgauuucacccugaagauuagucgggucgaggcugaggacgucggcgucu
acuauugugcagagaccagucacguccccuggacuuucggucaggggaccaaacuggagaucaagaccacaacaccugcucca
aggccccccacacccgcuccaacuauagccagccaaccauugagccucagaccugaagcuugcaggcccgcagcaggaggcgcc
ucccuugugaucacucuguauuguaggaguaagaggagcaggcuccugcacagugacuacaugaacaugacuccccgccgcc
ccgggcccacccgcaagcauuaccagcccuaugccccaccacgcgacuucgcagccuaucgcuccagggugaaauuuucuaga
agcgccgaugcucccgcauaucagcagggucagaaucagcucuacaaugaauugaaucucggcaggcgagaagaguacgaug
uucuggacaagagacggggcagggaucccgagauggggggaaagccccggagaaaaaauccucaggagggguuguacaauga
gcugcagaaggacaagauggcugaagccuauagcgagaucggaaugaaaggcgaaagacgcagaggcaaggggcaugacggu
cuguaccagggucucucuacagccaccaaggacacuuaugaugcguugcauaugcaagccuugccaccccgc

[1156] The BCMA-CAR fusion polypeptide comprised an amino acid sequence of:

(SEQ ID NO: 15450)
MALPVTALLLPLALLLHAARPQVQLVQSGAEVKKPGASVKVSCKASGY
SFPDYYINWVRQAPGQGLEWMGWIYFASGNSEYNQKFTGRVTMTRDTS
SSTAYMELSSLRSEDTAVYFCASLYDYDWYFDVWGQGTMVTVSSGGGG
SGGGGSGGGGSDIVMTQTPLSLSVTPGEPASISCKSSQSLVHSNGNTY
LHWYLQKPGQSPQLLIYKVSNRFSGVPDRFSGSGSGADFTLKISRVEA
EDVGVYYCAETSHVPWTFGQGTKLEIKTTTPAPRPPTPAPTIASQPLS
LRPEACRPAAGGAVHTRGLDFACDIYIWAPLAGTCGVLLLSLVITLYC
RSKRSRLLHSDYMNMTPRRPGPTRKHYQPYAPPRDFAAYRSRVKFSRS
ADAPAYQQGQNQLYNELNLGRREEYDVLDKRRGRDPEMGGKPRRKNPQ
EGLYNELQKDKMAEAYSEIGMKGERRRGKGHDGLYQGLSTATKDTYDA
LHMQALPPR

[1157] The BCMA-CAR fusion polypeptide comprised a CD8 hinge domain having an amino acid sequence of:

(SEQ ID NO: 1101)
TTTPAPRPPTPAPTIASQPLSLRPEACRPAAGGAVHTRGLDFACD

[1158] The BCMA-CAR fusion polypeptide comprised a CD8 transmembrane domain having an amino acid sequence of:

(SEQ ID NO: 1102)
IYIWAPLAGTCGVLLLSLVITLYC

[1159] The BCMA-CAR fusion polypeptide comprised a CD28 co-stimulatory domain having an amino acid sequence of:

(SEQ ID NO: 1103)
RSKRSRLLHSDYMNMTPRRPGPTRKHYQPYAPPRDFAAYRS

[1160] The BCMA-CAR fusion polypeptide comprised a CD3z signaling domain having an amino acid sequence of:

(SEQ ID NO: 1104)
RVKFSRSADAPAYQQGQNQLYNELNLGRREEYDVLDKRRGRDPEMGGKP
RRKNPQEGLYNELQKDKMAEAYSEIGMKGERRRGKGHDGLYQGLSTATK
DTYDALHMQALPPR

[1161] The BCMA-CAR fusion polypeptide comprised a GSG Linker having an amino acid sequence of:

GSG

[1162] The BCMA-CAR fusion polypeptide comprised a T2A peptide having an amino acid sequence of:

(SEQ ID NO: 1106)
EGRGSLLTCGDVEENPGP

[1163] Briefly, the template RNA for use with the RTE1_MD gene modifying system had the following sequences from 5′ to 3′:

[1164] 5′ UTRᵣₑₜᵣₒ, bGH polyA, WPRE, BCMA-CAR, Kozak sequence, MND promoter, 3′ UTRᵣₑₜᵣₒ.

[1165] The RTE1_MD gene modifying system comprising a BCMA-CAR template RNA was introduced into primary human CD3+ T cells. Briefly, human CD3+ T cells stored in liquid nitrogen from one donor were thawed in TexMACS culture media (Miltenyi) supplemented with 5% Human AB serum, IL2 (20 IU/mL; Miltenyi), IL7 (10 ng/mL; Miltenyi), and IL15 (5 ng/mL; Miltenyi). Cells were activated immediately post thaw by supplementing the culture media with TransACT (according to manufacturer's protocol) for two days.

[1166] Activated T cells were electroporated with mRNA encoding RTE1_MD gene modifying polypeptide and BCMA CAR template RNA. As a control, T cells that underwent no genetic modification were cultured along with cells that underwent the electroporated conditions. For the electroporation, a total of 500-700 million T cells were electroporated with 500 μg/mL of RNA (mass ratio of 200 template:1 driver) in a volume of 400-450 uLs of OptiMEM to maintain a cell concentration of 4×10⁸ cells/mL Electroporations were quenched in expansion media (TexMACS, 100 IU/mL IL2, 10 ng/mL of IL7, 5 ng/mL of IL15, 5% Human AB serum). Electroporated T cells were expanded until day 10 post thaw and analyzed by flow cytometry for CAR expression on days 7 and 10 post-thaw. 100 IU/mL IL2 was also added to the cell culture on these days to promote cell expansion.

[1167] On day 10, CART cells were harvested and function was assessed via a BCMA target cell killing assay. Briefly, BCMA-CART cells were co-cultured for 24 hours with BCMA-positive tumor cell lines (H929) at serially decreasing T cell (effector) to tumor cell ratios. Cells from co-culture were stained with antibodies to uniquely identify surface markers for both target cells and effector cells. Stained co-cultures were acquired on a flow cytometer with dead cell exclusion via a vital dye. Targets were positively identified during analysis and absolute counts of target cells for each condition were generated by volumetric readout by the flow cytometer. All conditions were normalized to a target only well to control for tumor growth via the following equation: % Killing=1−(number of target cells in test condition/number of target cells in normalization control)*100. After 24 hours culture supernatants were assessed for IFNγ and Granzyme B concentration via ELISA.

[1168] As shown in FIG. 7, BCMA-CAR, introduced by the RTE1-MD gene modifying system, expressed in human primary T cells obtained from three different donors. Activated T cells were co-electroporated with both RTE1_MD gene modifying polypeptide and the BCMA CAR template and assessed for CAR expression 3 days post electroporation. The average CAR expression observed was 12% and the highest expression of BCMA CAR from one donor observed was 15%. In comparison, cells treated with either mRNA encoding RTE1_MD gene modifying polypeptide alone or BCMA CAR template alone did not show any BCMA CAR expression. These results demonstrate that RTE1-MD gene modifying systems can be used to insert and express a therapeutic transgene (a BCMA CAR) into human primary T cells.

[1169] As shown in FIG. 8A, primary human T cells from two donors that express BCMA-CAR (as delivered by RTE1_MD gene modifying system) killed BCMA positive tumor cells in a dose dependent manner. Over 50% killing was seen at a 0.625 ratio of effector T cells to tumor cells for one donor, and approximately 73-85% killing was observed for both donors with a 2.5 or 5 ratio of effector T cells to tumor cells. As shown in FIG. 8B, increased IFNγ production and Granzyme B release were seen with increasing concentrations of CART cells to tumor bearing targets. Both are biomarkers for cytotoxicity of CART cells against tumor cells. These data, taken together, indicate that the BCMA CAR T cells produced using RTE1_MD gene modifying systems represent a functional and potent CART product that controlled tumor growth in vitro. BCMA-CAR was also introduced into human primary T cells using the Vingi-1_Acar gene modifying system described herein or the RTE1-MD gene modifying system described herein using different processes (FIG. 16). For Vingi-1_Acar process two, the gene modifying system used an mRNA comprising N1-Methylpseudouridine as an alternative chemical modification. This change resulted in an increase average expression of 0.7% to 1.5% BCMA CAR. Vingi-1_Acar process three incubated the primary T cells at 30° C. 24 hours post electroporation of the Vingi-1_Acar gene modifying system. This resulted in a modest increase in BCMA CAR editing and expression. Use of RTE1-MD gene modifying system improved BCMA CAR expression to 7.5% (process 1). RTE1-MD gene modifying system process two electroporated mRNA encoding RTE1-MD gene modifying polypeptide and BCMA CAR template at a mass ratio of 1 to 200 while process one was 1:25. The process two ratio dramatically increased expression of BCMA CAR relative to process one (and further described above).

### Example 7: Gene Editing of Primary Human T Cells with a BCMA CAR by a Retrotransposon-Based Gene Modifying System Results in CART Cells that can Kill Target Tumor Cells

[1170] This example demonstrates that exemplary gene modifying systems may be used to introduce a chimeric antigen receptor (CAR) molecule into the genome of primary human T cells. The resultant CART cell can kill target tumor cells.

[1171] The gene modifying system used in this Example comprises a nucleic acid encoding an exemplary Vingi-1_Acar gene modifying polypeptide comprising an amino acid sequence of:

(SEQ ID NO: 405)
MDEYQRSLSRPLLTIMSINIEGLSLAKEELLAKMSEDISCDILCIQETH
RDITMRRPKILGMQLAVERPHRQYGSAIFVRSGVAISATSLTEVNNIEI
LSVELDSCTVSSLYKPPGADFYFTPPTSCHNHEAHFVVGDFNSHSCVWG
YDEDDRNGEAVLTWADNSRMSLLHDSKLPPSFNSGRWKRGYNPDLIFVK
ESISHQCTKRVLNPIPNTQHRPICCVAYAAVRPKSVPFRRRYNFNKANW
TKFTETLEAAISDIEPSIENYDLFVEAVKRSSRLSIPRGCRTSYLPGLN
EESLNQLQEYLRLFQENPYSDGTIAAGQKLSTALANAKKDRWIELLENL
DMSKSSRKAWQLLRRLDSDPLVNPGHANVTPDQIAHQLIQNGKTNCSRI
KMKINRVPELETHQLSSPLNLKELREAIKRCKTGKAPGLDDLMMEQIKH
LGAKAENWLLKFYNQCLAHKQIPRAWRKTKIIAILKPGKDASNARNYRP
ISLLCHLYKVYERMLLNRLGPVIEPKLIAQQAGFRPGKNCTGQILHILT
EHIEEGYEKGCITGTVFVDLTAAYDTVQHRKMLHKVYHITRDFDFTKTV
QTLLENRSFYVEFQGQKSRWRRQKNGLPQGSVLAPTLFNIFTNDQPQPP
LTKSFIYADDLGLTTQAKDFETVEKQLTNALKDLSSYYKENHLKPNPAK
TQVCAFHLRNREANRKLKVTWEGQELEHCFHPKYLGVTLDRTLTYRKHC
MNTKHKVAARNNILRKLTGSAWGADPQVIRTSALALSFSTAEYACPVWH
KSAHAKQVDIALNETCRIITGCLKPTPVDKLYKLAGIAPPDVRREVAAN
GERKKVEHCESHPLHGYHPPPTRLKSRKGFMRTTTPLDVPPAAARVSLW
AAKPGNSNWMAPQEGLPPGANQEWATWKSLNRLRSGVGRSKDNLARWHY
LEESSTLCDCGAEQTTQHMYACPQCPASCTEEELFKATDNAVAVARFWS
KTI

[1172] The gene modifying polypeptide comprised a 3GS (SEQ ID NO: 15441) Linker having an amino acid sequence of:

(SEQ ID NO: 15442)
GGGS

[1173] The gene modifying polypeptide comprised an SV40 NLS having an amino acid sequence of:

(SEQ ID NO: 345)
PKKKRKV

[1174] The gene modifying polypeptide comprised an XTEN linker having an amino acid sequence of:

(SEQ ID NO: 220)
SGSETPGTSESATPES

[1175] The gene modifying polypeptide used in this Example comprised an HiBit tag having an amino acid sequence of:

(SEQ ID NO: 15443)
VSGWRLFKKIS

[1176] The gene modifying system further comprises a template RNA that encoded a BCMA-CAR-T2A-RQR8 fusion polypeptide, the template RNA comprising a nucleic acid sequence of:

(SEQ ID NO: 15451)
ccggcgcggagguaaaaaagccuggcgccagcgugaaagugagcuguaaggcuuccggcuacagcuucccagauuacuauau
caauugggugcggcaggcucccgggcagggacucgaguggauggguuggaucuauuuugcgagcggaaacucugaguacaa
ccagaaguucaccggcaggguuaccaugacccgegacacgucaaguucuacggcauacauggagcugucuagucucaggucc
gaagauaccgccguguauuucugcgccucccuguaugauuaugacugguacuucgagucuggggccagggcaccaugguga
cagugucuuccgguggcgguggcuccggggagguggcucuggaggggguggcagegauaucgugaugacccagacuccac
ugucucugucugugaccccuggugagccggegagcaucuccugcaagaguucccagagucugguccacucuaacggcaacac
cuaccugcacugguaucugcagaagccgggccaaaguccacagcuccugaucuacaagguuuccaaccguuucagcggggucc
cggaucgcuuuuccggcucagguagcggugccgauuucacccugaagauuagugggucgaggcugaggacguggcgucu
acuauugugcagagaccagucacguccccuggacuuucggucaggggaccaaacuggagaucaagaccacaacaccugcucca
aggccccccacacccgcuccaacuauagccagccaaccauugagccucagaccugaagcuugcaggcccgcagcaggaggcgcc
ucccuugugaucacucuguauuguaggaguaagaggagcaggcuccugcacagugacuacaugaacaugacuccccgccgcc
ccgggcccaccegcaagcauuaccagcccuaugccccaccacgcgacuucgcagccuaucgcuccagggugaaauuuucuaga
agcgccgaugcucccgcauaucagcagggucagaaucagcucuacaaugaauugaaucucggcaggcgagaagaguacgaug
uucuggacaagagacggggcagggaucccgagauggggggaaagccccggagaaaaaauccucaggagggguuguacaauga
gcugcagaaggacaagauggcugaagccuauagcgagaucggaaugaaaggcgaaagacgcagaggcaaggggcaugacggu
cuguaccagggucucucuacagccaccaaggacacuuaugaugcguugcauaugcaagccuugccaccccgcggaaguggug
agggcagaggaagucuucuaacaugcggugacguggaggagaaucccggcccuauggggacgucacuccuguguuggaugg
ccuugugccuccugggagcugaccacgcugacgcaugccccuacagcaacccuagcuugugcagcggugggguggguccga
acugccuacccaggggacuuuuucuaacguauccaccaacgugucccccgccaagcccacuacaaccgccugcccauacuccaa
ucucugcgcccggaagcgugucggcccgcggcuggggggccgugcacaccagaggccuggacuucgccugcgacaucuaca
ucugggccccauuggcagguaccugcggcguacugcuccugagucugguuauuacucuguacugcaaccaccggaacaggag
acgcgucuguaagugcccuagaccggugguguaa

[1177] The BCMA-CAR-T2A-RQR8 fusion polypeptide comprised an amino acid sequence of:

(SEQ ID NO: 15452)
MALPVTALLLPLALLLHAARPQVQLVQSGAEVKKPGASVKVSCKASGYS
FPDYYINWVRQAPGQGLEWMGWIYFASGNSEYNQKFTGRVTMTRDTSSS
TAYMELSSLRSEDTAVYFCASLYDYDWYFDVWGQGTMVTVSSGGGGSGG
GGSGGGGSDIVMTQTPLSLSVTPGEPASISCKSSQSLVHSNGNTYLHWY
LQKPGQSPQLLIYKVSNRFSGVPDRFSGSGSGADFTLKISRVEAEDVGV
YYCAETSHVPWTFGQGTKLEIKTTTPAPRPPTPAPTIASQPLSLRPEAC
RPAAGGAVHTRGLDFACDIYIWAPLAGTCGVLLLSLVITLYCRSKRSRL
LHSDYMNMTPRRPGPTRKHYQPYAPPRDFAAYRSRVKFSRSADAPAYQQ
GQNQLYNELNLGRREEYDVLDKRRGRDPEMGGKPRRKNPQEGLYNELQK
DKMAEAYSEIGMKGERRRGKGHDGLYQGLSTATKDTYDALHMQALPPRG
SGEGRGSLLTCGDVEENPGPMGTSLLCWMALCLLGADHADACPYSNPSL
CSGGGGSELPTQGTFSNVSTNVSPAKPTTTACPYSNPSLCSGGGGSPAP
RPPTPAPTIASQPLSLRPEACRPAAGGAVHTRGLDFACDIYIWAPLAGT
CGVLLLSLVITLYCNHRNRRRVCKCPRPVV*

[1178] The BCMA-CAR-T2A-RQR8 fusion polypeptide comprised a CD8 hinge domain having an amino acid sequence of:

(SEQ ID NO: 1101)
TTTPAPRPPTPAPTIASQPLSLRPEACRPAAGGAVHTRGLDFACD

[1179] The BCMA-CAR-T2A-RQR8 fusion polypeptide comprised a CD8 transmembrane domain having an amino acid sequence of:

(SEQ ID NO: 1102)
IYIWAPLAGTCGVLLLSLVITLYC

[1180] The BCMA-CAR-T2A-RQR8 fusion polypeptide comprised a CD28 co-stimulatory domain having an amino acid sequence of:

(SEQ ID NO: 1103)
RSKRSRLLHSDYMNMTPRRPGPTRKHYQPYAPPRDFAAYRS

[1181] The BCMA-CAR-T2A-RQR8 fusion polypeptide comprised a CD3z signaling domain having an amino acid sequence of:

(SEQ ID NO: 1104)
RVKFSRSADAPAYQQGQNQLYNELNLGRREEYDVLDKRRGRDPEMGGKPR
RKNPQEGLYNELQKDKMAEAYSEIGMKGERRRGKGHDGLYQGLSTATKDT
YDALHMQALPPR

[1182] The BCMA-CAR-T2A-RQR8 fusion polypeptide comprised a GSG Linker having an amino acid sequence of:

GSG

[1183] The BCMA-CAR-T2A-RQR8 fusion polypeptide comprised a T2A peptide having an amino acid sequence of:

(SEQ ID NO: 1106)
EGRGSLLTCGDVEENPGP

[1184] The BCMA-CAR-T2A-RQR8 fusion polypeptide comprised a RQR8 protein having an amino acid sequence of:

(SEQ ID NO: 15453)
MGTSLLCWMALCLLGADHADACPYSNPSLCSGGGGSELPTQGTFSNVSTN
VSPAKPTTTACPYSNPSLCSGGGGSPAPRPPTPAPTIASQPLSLRPEACR
PAAGGAVHTRGLDFACDIYIWAPLAGTCGVLLLSLVITLYCNHRNRRRVC
KCPRPVV*

[1185] Briefly, the template RNA for use with the Vingi-1_Acar gene modifying system comprises the following sequences from 5′ to 3′: 5′ UTRᵣₑₜᵣₒ, bGH polyA, WPRE, BCMA-CAR-T2A-RQR8, Kozak sequence, MND promoter, 3′ UTRᵣₑₜᵣₒ.

[1186] The Vingi-1_Acar gene modifying system and BCMA-CAR-T2A-RQR8 template RNA was introduced into primary human CD3+ T cells (FIG. 9A). Briefly, human CD3+ T cells stored in liquid nitrogen from one donor were thawed in TexMACS culture media (Miltenyi) supplemented with 5% Human AB serum, IL2 (20 IU/mL; Miltenyi), IL7 (10 ng/mL; Miltenyi), and IL15 (5 ng/mL; Miltenyi). Cells were activated immediately post thaw by supplementing the culture media with TransACT (according to manufacturer's protocol) for two days.

[1187] Activated T cells were electroporated with mRNA encoding Vingi-1_Acar gene modifying polypeptide and BCMA CAR template RNA. As a control, T cells that underwent no genetic modification were cultured along with cells that underwent the electroporated conditions. For the electroporation, a total of 500-700 million T cells were electroporated with 500 μg/mL of RNA (mass ratio of 2 template:1 driver) in a volume of 400-450 uLs of OptiMEM to maintain a cell concentration of 4e8 cells/mL. Electroporations were quenched in expansion media (TexMACS, 100 IU/mL IL2, 10 ng/mL of IL7, 5 ng/mL of IL15, 5% Human AB serum). Electroporated T cells were expanded until day 6 and Enrichment of the gene edited T cells was performed using the surface expressed RQR8 tag using the MultiMACS magnetic separation system and anti-CD34 magnetic beads (Miltenyi). Post-enrichment, the cells were expanded using expansion media (TexMACS, 100 IU/mL IL2, 10 ng/mL of IL7, 5 ng/mL of IL15, 5% Human AB serum) and analyzed by flow cytometry for CAR expression after 16 days. 100 IU/mL IL2 was also added to the cell culture on these days to promote cell expansion. FIG. 9B (top) shows a schematic of the delivered BCMA CAR and (bottom) shows a graph of the % BCMA CAR positive cells pre-enrichment and post-enrichment. The results demonstrate that cells begin with approximately 2.5% BCMA-CAR and can be enriched up to approximately 22% using the CD34 bead-based methods described herein. Such increases in enrichment can enable use of the cells for further downstream studies or for therapeutic purposes.

[1188] On day 9 of the experiment, cells were harvested and function was assessed via BCMA target cell killing assay. Briefly, BCMA-CART cells were co-cultured for 24 hours with BCMA-positive tumor cell lines (H929, BCMA Cell line 1 and RPMI-8226, BCMA Cell line 2) at serially decreasing T cell to tumor ratios. The co-cultures were harvested after 24 hours, and culture supernatants were assessed for IFNγ concentration via ELISA. Cells from co-culture were stained with antibodies to uniquely identify surface markers for both target cells and effector cells. Stained co-cultures were acquired on a flow cytometer with dead cell exclusion via a vital dye. Targets were positively identified during analysis and absolute counts of target cells for each condition were generated by volumetric readout by the flow cytometer. All conditions were normalized to a target only well to control for tumor growth via the following equation: % Killing=1−(number of target cells in test condition/number of target cells in normalization control)*100.

[1189] As shown in FIGS. 10A-10B, BCMA-CART cells generated using the Vingi-1_Acar gene modifying system were shown to be functional via a dose dependent reduction in the number of targets observed in each effector/target condition as compared to the normalization control for both target cell lines (FIG. 10A). IFNγ levels from corresponding culture supernatants also show a correlative dose response to observed killing from BCMA CART cells tested (FIG. 10B). These data, taken together, indicate a functional and potent CART product derived from the Vingi-1_Acar gene modifying system that is able to control tumor growth in vitro.

### Example 8: Evaluating Tumor Cell Killing in Cancer-Bearing Mice by BCMA CART Cells Generated Using an Exemplary Retrotransposon-Based Gene Modifying System

[1190] This Example demonstrates that exemplary CART cells expressing a BCMA-targeted CAR and generated using a Vingi-1_Acar gene modifying system described herein are capable of killing exemplary human cancer cells (multiple myeloma tumor cells) in mouse models.

[1191] BCMA CART cells were generated as described in Example 7 using the Vingi-1_Acar gene modifying system described in Example 7.

[1192] NSG mice (NOD.Cg-Prkdcscid Il2rgtm1Wjl/SzJ), 8-10 weeks of age (The Jackson Laboratory) were implanted via subcutaneous injection in the right flank with 1×10⁶ RPMI-8226 human multiple myeloma tumor cells (ATCC). Tumors were measured twice weekly with digital calipers and the tumor volume was calculated using the formula Volume (mm3)=(L×W²)/2 where L=length and W=Width. When tumors reached an average size of ˜30 mm³ (Day 24), mice (n=5/group) were treated with 5×10⁶ anti-BCMA CAR+ T cells (as described previously) or un-transduced (UTD) T cells via intravenous injection. As the percentage of CAR+ T cells was ˜20% of the total T cell count, each mouse received 2.5×10⁷ total T cells, whereas mice in the control groups (n=5/group) received either 2.5×10⁷ un-transduced T cells or PBS vehicle control.

[1193] FIG. 11A-11C compares individual animal RPMI-8266 tumor growth kinetics in each of the treatment groups (vehicle treated FIG. 11A, untransduced T cells treated FIG. 11B, and BCMA CART treated FIG. 11C). By Day 39 (15 days post-treatment), 4/5 mice treated with anti-BCMA CAR T cells had cleared their tumors and the tumor that was not yet cleared at that timepoint was substantially reduced in size. In contrast, animals treated with vehicle control experienced continued tumor growth. Likewise, animals treated with UTD T cells experienced continued tumor growth until Day 36 when a presumed anti-tumor allograft rejection response began to impact the experiment, slowing tumors growth in this group. Without wishing to be bound by theory, the allograft rejection response is thought to be an artifact of the model system; the timing of allograft rejection onset varies from one human T cell donor to another. Regardless, the results showed a reduction in tumor volume when mice were treated with BCMA CART cells derived from the gene modifying system described herein, and increases or increases and plateauing of tumor volume in the control treated mice.

[1194] These data demonstrate that anti-BCMA CAR T cells generated via retrotransposon derived gene modifying systems, (e.g., a Vingi-1_Acar gene modifying system) are effective at clearing multiple myeloma tumor xenografts in NSG mice.

### Example 9: Evaluating Combined Activity of Exemplary TRAC Human Template RNAs with Gene Modifying Systems to Install CARs

[1195] This example describes the use of a first exemplary system containing a first heterologous gene modifying polypeptide and a template RNA to produce an insertion of 5 nucleotides (TAGTG) in the first exon of human TRAC gene in primary human T cells, and an exemplary gene modifying system containing a gene modifying polypeptide and a template RNA to insert expression cassettes for a chimeric antigen receptor (CAR) or a GFP molecule into the genome of the primary human T cells, as well as quantification of said activities. The insertion generated a frameshift that resulted in a non-functional gene (also referred to as a knock-out).

[1196] In this example, the template RNA of the heterologous gene modifying system contained:
[1197] (1) a gRNA spacer;
[1198] (2) a gRNA scaffold;
[1199] (3) a heterologous object sequence; and
[1200] (4) a primer binding site (PBS) sequence.

[1201] The exemplary template RNA generated and used in the heterologous gene modifying system is given in Table E1. Nucleotide modifications are noted as follows: phosphorothioate linkages denoted by an asterisk, 2′-O-methyl groups denoted by an ‘m’ preceding a nucleotide.

TABLE E1
Exemplary Template RNAs and Sequences

| | | | SEQ |
|---|---|---|---|
| | | | ID |
| Name | Descriptor | Sequence | NO |
| RNACS6062 | TRAC5_ | mG*mC*mU*rGrGrUrArCrArCrGrGrCrArGrGrGrU | 15,001 |
| | P9R22_ | rCrArGrUrUrUrUrArGrAmGmCmUmAmGmAmAmAmUm | |
| | ins5-nick | AmGmCrArArGrUrUrArArArArUrArArGrGrCrUrA | |
| | | rGrUrCrCrGrUrUrArUrCrAmAmCmUmUmGmAmAmAm | |
| | | AmAmGmUmGmGmCmAmCmCmGmAmGmUmCmGmGmUmGmC | |
| | | rGrArUrArUrCrCrArGrArArCrCrCrUrGrArUrAr | |
| | | GrUrGrCrCrCrUrGrC*mC*mG*mU | |

Table E1 shows the sequences of E1 without chemical modifications. In some embodiments, the sequences of Table E1A may be used without chemical modifications, or with one or more chemical modifications.

TABLE E1A
Table E1 Sequences without Chemical Modifications

| | | | SEQ |
|---|---|---|---|
| | | | ID |
| RNACS | Name | Sequence | NO |
| RNACS6062 | TRAC5_ | GCUGGUACACGGCAGGGUCAGUUUUAGAGCUAGAAAUAGCA | 15,000 |
| | P9R22_ | AGUUAAAAUAAGGCUAGUCCGUUAUCAACUUGAAAAAGUGG | |
| | ins5- | CACCGAGUCGGUGCGAUAUCCAGAACCCUGAUAGUGCCCUG | |
| | nick | CCGU | |

[1202] In this example, exemplary heterologous gene modifying polypeptides of the first gene modifying system contained:
[1203] (1) an endonuclease and/or DNA binding domain;
[1204] (2) a peptide linker; and
[1205] (3) a reverse transcriptase (RT) domain,
   where (1), (2), and (3) are heterologous to each other.
   The exemplary heterologous modifying polypeptide of the heterologous gene modifying system was RNAIVT593, and comprised the amino acid sequence of indicated in Table E2. In some embodiments, heterologous gene modifying polypeptides contain one or more nuclear localization sequences (NLSs). The gene modifying polypeptide of RNAIVT593 comprises an N-terminal NLS and a C-terminal NLS.

TABLE E2
Exemplary heterologous gene modifying polypeptide and Sequence

| | | SEQ |
|---|---|---|
| Name | AA sequence | ID NO |
| RNAIVT593 | MPAAKRVKLDGGDKKYSIGLDIGTNSVGWAVITDEYKVPSK | 15008 |
| | KFKVLGNTDRHSIKKNLIGALLFDSGETAEATRLKRTARRRY | |
| | TRRKNRICYLQEIFSNEMAKVDDSFFHRLEESFLVEEDKKHER | |
| | HPIFGNIVDEVAYHEKYPTIYHLRKKLVDSTDKADLRLIYLAL | |
| | AHMIKFRGHFLIEGDLNPDNSDVDKLFIQLVQTYNQLFEENPI | |
| | NASGVDAKAILSARLSKSRRLENLIAQLPGEKKNGLFGNLIAL | |
| | SLGLTPNFKSNFDLAEDAKLQLSKDTYDDDLDNLLAQIGDQY | |
| | ADLFLAAKNLSDAILLSDILRVNTEITKAPLSASMIKRYDEHH | |
| | QDLTLLKALVRQQLPEKYKEIFFDQSKNGYAGYIDGGASQEE | |
| | FYKFIKPILEKMDGTEELLVKLNREDLLRKQRTFDNGSIPHQI | |
| | HLGELHAILRRQEDFYPFLKDNREKIEKILTFRIPYYVGPLARG | |
| | NSRFAWMTRKSEETITPWNFEEVVDKGASAQSFIERMTNFDK | |
| | NLPNEKVLPKHSLLYEYFTVYNELTKVKYVTEGMRKPAFLSG | |
| | EQKKAIVDLLFKTNRKVTVKQLKEDYFKKIECFDSVEISGVED | |
| | RFNASLGTYHDLLKIIKDKDFLDNEENEDILEDIVLTLTLFEDR | |
| | EMIEERLKTYAHLFDDKVMKQLKRRRYTGWGRLSRKLINGI | |
| | RDKQSGKTILDFLKSDGFANRNFMQLIHDDSLTFKEDIQKAQ | |
| | VSGQGDSLHEHIANLAGSPAIKKGILQTVKVVDELVKVMGRH | |
| | KPENIVIEMARENQTTQKGQKNSRERMKRIEEGIKELGSQILK | |
| | EHPVENTQLQNEKLYLYYLQNGRDMYVDQELDINRLSDYDV | |
| | DHIVPQSFLKDDSIDNKVLTRSDKARGKSDNVPSEEVVKKMK | |
| | NYWRQLLNAKLITQRKFDNLTKAERGGLSELDKAGFIKRQLV | |
| | ETRQITKHVAQILDSRMNTKYDENDKLIREVKVITLKSKLVSD | |
| | FRKDFQFYKVREINNYHHAHDAYLNAVVGTALIKKYPKLESE | |
| | FVYGDYKVYDVRKMIAKSEQEIGKATAKYFFYSNIMNFFKTE | |
| | ITLANGEIRKRPLIETNGETGEIVWDKGRDFATVRKVLSMPQV | |
| | NIVKKTEVQTGGFSKESILPKRNSDKLIARKKDWDPKKYGGF | |
| | DSPTVAYSVLVVAKVEKGKSKKLKSVKELLGITIMERSSFEK | |
| | NPIDFLEAKGYKEVKKDLIIKLPKYSLFELENGRKRMLASAGE | |
| | LQKGNELALPSKYVNFLYLASHYEKLKGSPEDNEQKQLFVEQ | |
| | HKHYLDEIIEQISEFSKRVILADANLDKVLSAYNKHRDKPIRE | |
| | QAENIIHLFTLTNLGAPAAFKYFDTTIDRKRYTSTKEVLDATLI | |
| | HQSITGLYETRIDLSQLGGDSGGSSGGSSGSETPGTSESATPES | |
| | SGGSSGGSSTLNIEDEYRLHETSKEPDVSLGSTWLSDFPQAWA | |
| | ETGGMGLAVRQAPLIIPLKATSTPVSIKQYPMSQEARLGIKPHI | |
| | QRLLDQGILVPCQSPWNTPLLPVKKPGTNDYRPVQDLREVNK | |
| | RVEDIHPTVPNPYNLLSGLPPSHQWYTVLDLKDAFFCLRLHPT | |
| | SQPLFAFEWRDPEMGISGQLTWTRLPQGFKNSPTLFNEALHR | |
| | DLADFRIQHPDLILLQYVDDLLLAATSELDCQQGTRALLQTL | |
| | GNLGYRASAKKAQICQKQVKYLGYLLKEGQRWLTEARKET | |
| | VMGQPTPKTPRQLREFLGKAGFCRLFIPGFAEMAAPLYPLTKP | |
| | GTLFNWGPDQQKAYQEIKQALLTAPALGLPDLTKPFELFVDE | |
| | KQGYAKGVLTQKLGPWRRPVAYLSKKLDPVAAGWPPCLRM | |
| | VAAIAVLTKDAGKLTMGQPLVILAPHAVEALVKQPPDRWLS | |
| | NARMTHYQALLLDTDRVQFGPVVALNPATLLPLPEEGLQHN | |
| | CLDILAEAHGTRPDLTDQPLPDADHTWYTDGSSLLQEGQRKA | |
| | GAAVTTETEVIWAKALPAGTSAQRAELIALTQALKMAEGKK | |
| | LNVYTDSRYAFATAHIHGEIYRRRGWLTSEGKEIKNKDEILAL | |
| | LKALFLPKRLSIIHCPGHQKGHSAEARGNRMADQAARKAAIT | |
| | ETPDTSTLLIENSSPSGGSKRTADGSEFEKRTADGSEFESPKKK | |
| | AKVE | |

[1206] In this example, exemplary gene modifying polypeptides of the gene modifying system contained:
[1207] (1) an endonuclease and/or DNA binding domain; and
[1208] (2) a reverse transcriptase (RT) domain,
   where (1) and (2) are both derived from a retrotransposon (and in this Example, from the same retrotransposons). Accordingly, the gene modifying polypeptides in this Example were examples of retrotransposon gene modifying polypeptides.

[1209] The gene modifying system used in this Example comprised either of two exemplary retrotransposon gene modifying polypeptides: RNAIVT696 (SEQ ID NO: 15,002) and RNAIVT1123 (SEQ ID NO:15,003), and amino acid sequences are given in Table E4. In some embodiments, gene modifying polypeptides contain one or more NLSs and/or one or more tag sequences (e.g., to facilitate purification, detection, or quantification). The gene modifying polypeptide of RNAIVT696 comprises a C-terminal NLS and Hibit tag. The gene modifying polypeptide of RNAIVT1123 comprises a C-terminal NLS and Hibit tag.

TABLE E4
Exemplary gene modifying polypeptide and Sequences

| | | SEQ |
|---|---|---|
| Name | AA sequence | ID NO |
| RNAIVT696 | MDEYQRSLSRPLLTIMSINIEGLSLAKEELLAKMSEDISCDILCI | 15,002 |
| | QETHRDITMRRPKILGMQLAVERPHRQYGSAIFVRSGVAISAT | |
| | SLTEVNNIEILSVELDSCTVSSLYKPPGADFYFTPPTSCHNHEA | |
| | HFVVGDFNSHSCVWGYDEDDRNGEAVLTWADNSRMSLLHD | |
| | SKLPPSFNSGRWKRGYNPDLIFVKESISHQCTKRVLNPIPNTQ | |
| | HRPICCVAYAAVRPKSVPFRRRYNFNKANWTKFTETLEAAIS | |
| | DIEPSIENYDLFVEAVKRSSRLSIPRGCRTSYLPGLNEESLNQL | |
| | QEYLRLFQENPYSDGTIAAGQKLSTALANAKKDRWIELLENL | |
| | DMSKSSRKAWQLLRRLDSDPLVNPGHANVTPDQIAHQLIQN | |
| | GKTNCSRIKMKINRVPELETHQLSSPLNLKELREAIKRCKTGK | |
| | APGLDDLMMEQIKHLGAKAENWLLKFYNQCLAHKQIPRAW | |
| | RKTKIIAILKPGKDASNARNYRPISLLCHLYKVYERMLLNRLG | |
| | PVIEPKLIAQQAGFRPGKNCTGQILHLTEHIEEGYEKGCITGTV | |
| | FVDLTAAYDTVQHRKMLHKVYHITRDFDFTKTVQTLLENRS | |
| | FYVEFQGQKSRWRRQKNGLPQGSVLAPTLFNIFTNDQPQPPL | |
| | TKSFIYADDLGLTTQAKDFETVEKQLTNALKDLSSYYKENHL | |
| | KPNPAKTQVCAFHLRNREANRKLKVTWEGQELEHCFHPKYL | |
| | GVTLDRTLTYRKHCMNTKHKVAARNNILRKLTGSAWGADP | |
| | QVIRTSALALSFSTAEYACPVWHKSAHAKQVDIALNETCRIIT | |
| | GCLKPTPVDKLYKLAGIAPPDVRREVAANGERKKVEHCESHP | |
| | LHGYHPPPTRLKSRKGFMRTTTPLDVPPAAARVSLWAAKPG | |
| | NSNWMAPQEGLPPGANQEWATWKSLNRLRSGVGRSKDNLA | |
| | RWHYLEESSTLCDCGAEQTTQHMYACPQCPASCTEEELFKAT | |
| | DNAVAVARFWSKTIGGGSPKKKRKVSGSETPGTSESATPESV | |
| | SGWRLFKKIS | |
| RNAIVT1123 | MDSTAHPNQGRGLEKVSQTLPALQTPGQHTAAGGSSPLSGR | 15,003 |
| | NQRKNTKKLLLGAWNIRTLLDRENTPRPERRTALIGKELARY | |
| | NIDIAALSETRLPEEGSLSEPTTGYTFFWKGRASNEDRIHGVG | |
| | LAIKTSLLKQLPDLPVGISERLMKIRLPLSKDRYATIISAYAPTL | |
| | TSTEETIEQFYSDLSAVLHSVPTNDKLILLGDFNARVGQDHER | |
| | WKGVLGKHGVGKMNNNGLLLLSKCSEFELTITNTVFRMANK | |
| | YKTTWMHPRSKQWHLIDYIIVRRRDIQDVKITRAMRGAECW | |
| | TDHRLVRATLQMRIAPRHPKRAQTVRAFYNVSRLRDPSYLQT | |
| | FQSCLDDKLSAKGPLTGSSTEKWNQFRDAVKETSKAVLGPK | |
| | QRNHQDWFDENNTAIEDLLSKKNKAFMEWQNNPNSAPKKD | |
| | RFKSLQATAQREIRKMQDRWWEKKAEEIQRFADMKNYKQFF | |
| | SALKTVYGPLKPTTTPLLSSDGDTLIKDKKGISNRWKEHFSQL | |
| | LNRPSSVDQSALDQIPQNRTIEQLDVPPSIEEVQKAIKQMSAG | |
| | KAPGKDGIPTEVYKALNGKALQAFHIVLTSIWEEEDMPPELR | |
| | DASIVALYKNKGSRAACDNYRGISLLSTAGKILARVILNRLLS | |
| | SVSEQNLPESQCGFRPDRSTIDMVFTVRQMQEKCLEQNLSLYI | |
| | VFIDLTKAFDTVNRDALWVILSKLGCPAKFVKLIQLFHVDMT | |
| | GEVLSGGETSDRFNISNGVKQGCVLAPVLFNLFFTQVLRHAV | |
| | MDLDLGVYIKYRLDGSLFDLRRLTAKTKTTERLILEALFADD | |
| | CALMAHQENHLQTIVDRFSTATKLFGLTISLSKTEVLFQPAPG | |
| | RPTNQPCITIDGTQLSNVNTFKYLGSTIANDGSLDHEINARIQK | |
| | ASQALGRLRCKVLQHRGVSTATKLKVYNAVVLSSLLYGCET | |
| | WTLYRKHMKQLEQFHQRSLRSIMRIRWQDRITNQEVLDRAN | |
| | STSIEVMVLKTQLRWSGHVIRMDPQRIPRQVFYGELSAGLRK | |
| | QGRPKKRFKDQLKSNLKWAGITPKQLELAASDRSSWRTHINH | |
| | AATTFEDERRRRLAAARERRHQATTAPPVTTGVPCPMCHKL | |
| | CASAFGLQSHMRVHRRSGSETPGTSESATPESVSGWRLFKKIS | |

[1210] Exemplary templates RNAs comprising sequences capable of binding the exemplary retrotransposon gene modifying polypeptides included RNAIVT354 and RNAIVT381 for RNAIVT696 gene modifying polypeptide and RNAIVT610 and RNAIVT1200 for RNAIVT1123 gene modifying polypeptide. Sequences are given in Table E5.

TABLE E5
Exemplary gene modifying RNA template and Sequences

| | | SEQ ID |
|---|---|---|
| Name | RNA sequence (5′ to 3′) | NO |
| RNAIVT354 | GGGGGACACGGAAAGAGCCUCCCCGAAGAUUGAGUGAAUUCAGUCGGGCGUCCCCUGGGCAACGUU | 15454 |
| | UCUUGUAAGCGGCCGAUCUUUCCACCCCAAAAGCAUUGGAUGAGGAUCCGUUCUUUCCGCCUCAGA | |
| | AGCCAUAGAGCCCACCGCAUCCCCAGCAUGCCUGCUAUUGUCUUCCCAAUCCUCCCCCUUGCUGUCC | |
| | UGCCCCACCCCACCCCCCAGAAUAGAAUGACACCUACUCAGACAAUGCGAUGCAAUUUCCUCAUUUU | |
| | AUUAGGAAAGGACAGUGGGAGUGGCACCUUCCAGGGUCAAGGAAGGCACGGGGGAGGGGCAAACAA | |
| | CAGAUGGCUGGCAACUAGAAGGCACAGUCGAGGCUGAUCAGCGAGUCGACGGUUUACUUGUACAGC | |
| | UCGUCCAUGCCGAGAGUGAUCCCGGCGGCGGUCACGAACUCCAGCAGGACCAUGUGAUCGCGCUUC | |
| | UCGUUGGGGUCUUUGCUCAGGGCGGACUGGGUGCUCAGGUAGUGGUUGUCGGGCAGCAGCACGGGG | |
| | CCGUCGCCGAUGGGGGUGUUCUGCUGGUAGUGGUCGGCGAGCUGCACGCUGCCGUCCUCGAUGUUG | |
| | UGGCGGAUCUUGAAGUUCACCUUGAUGCCGUUCUUCUGCUUGUCGGCCAUGAUAUAGACGUUGUGG | |
| | CUGUUGUAGUUGUACUCCAGCUUGUGCCCCAGGAUGUUGCCGUCCUCCUUGAAGUCGAUGCCCUUC | |
| | AGCUCGAUGCGGUUCACCAGGGUGUCGCCCUCGAACUUCACCUCGGCGCGGGUCUUGUAGUUGCCG | |
| | UCGUCCUUGAAGAAGAUGGUGCGCUCCUGGACGUAGCCUUCGGGCAUGGCGGACUUGAAGAAGUCG | |
| | UGCUGCUUCAUGUGGUCGGGGUAGCGGCUGAAGCACUGCACGCCGUAGGUCAGGGUGGUCACGAGG | |
| | GUGGGCCAGGGCACGGGCAGCUUGCCGGUGGUGCAGAUGAACUUCAGGGUCAGCUUGCCGUAGGUG | |
| | GCAUCGCCCUCGCCCUCGCCGGACACGCUGAACUUGUGGCCGUUUACGUCGCCGUCCAGCUCGACCA | |
| | GGAUGGGCACCACCCCGGUGAACAGCUCCUCGCCCUUGCUCACCAUGGUGGCUUUACCAACAGUACC | |
| | GGAAUGCCAAGCUUGGGUCcUGGGGAGAGAGGUCGGUGAUUCGGUCAACGAGGGAGCCGACUGCCG | |
| | ACGUGCGCUCCGGAGGCUUGCAGAAUGCGGAACACCGCGCGGGCAGGAACAGGGCCCACACUACCG | |
| | CCCCACACCCCGCCUCCCGCACCGCCCCUUCCCGGCCGCUGCUCUCGGCGCGCCCUGCUGAGCAGCCG | |
| | CUAUUGGCCACAGCCCAUCGCGGUCGGCGCGCUGCCAUUGCUCCCUGGCGCUGUCCGUCUGCGAGGG | |
| | UACUAGUGAGACGUGCGGCUUCCGUUUGUCACGUCCGGCACGCCGCGAACCGCAAGGAACCUUCCC | |
| | GACUUAGGGGCGGAGCAGGAAGCGUCGCCGGGGGGCCCACAAGGGUAGCGGCGAAGAUCCGGGUGA | |
| | CGCUGCGAACGGACGUGAAGAAUGUGCGAGACCCAGGGUCGGCGCCGCUGCGUUUCCCGGAACCAC | |
| | GCCCAGAGCAGCCGCGUCCCUGCGCAAACCCAGGGCUGCCUUGGAAAAGGCGCAACCCCAACCCCGC | |
| | GGCCGCUAGUUGCUUGUGAUUUCUUUUCUUUUUUAUUUUAUUUCCAUUAUUUGAAAUGUAUUUGU | |
| | UGUAGCAAUGCUUUUGACACGAAAUAAAUAAA | |
| RNAIVT381 | GGGGGACACGGAAAGAGCCUCCCCGAAGAUUGAGUGAAUUCAGUCGGGCGUCCCCUGGGCAACGUU | 15009 |
| | UCUUGUAAGCGGCCGAUCUUUCCACCCCAAAAGCAUUGGAUGAGUUUACGGAUCCGAAUUCUCGAC | |
| | GGAUCGAUCCGAACAAACGACCCAACACCCGUGCGUUUUAUUCUGUCUUUUUAUUGCCGAUCCCCC | |
| | GGCCGCUUUACUUGUACAGCUCGUCCAUGCCGAGAGUGAUCCCGGCGGCGGUCACGAACUCCAGCA | |
| | GGACCAUGUGAUCGCGCUUCUCGUUGGGGUCUUUGCUCAGGGCGGACUGGGUGCUCAGGUAGUGGU | |
| | UGUCGGGCAGCAGCACGGGGCCGUCGCCGAUGGGGGUGUUCUGCUGGUAGUGGUCGGCGAGCUGCA | |
| | CGCUGCCGUCCUCGAUGUUGUGGCGGAUCUUGAAGUUCACCUUGAUGCCGUUCUUCUGCUUGUCGG | |
| | CCAUGAUAUAGACGUUGUGGCUGUUGUAGUUGUACUCCAGCUUGUGCCCCAGGAUGUUGCCGUCCU | |
| | CCUUGAAGUCGAUGCCCUUCAGCUCGAUGCGGUUCACCAGGGUGUCGCCCUCGAACUUCACCUCGGC | |
| | GCGGGUCUUGUAGUUGCCGUCGUCCUUGAAGAAGAUGGUGCGCUCCUGGACGUAGCCUUCGGGCAU | |
| | GGCGGACUUGAAGAAGUCGUGCUGCUUCAUGUGGUCGGGGUAGCGGCUGAAGCACUGCACGCCGUA | |
| | GGUCAGGGUGGUCACGAGGGUGGGCCAGGGCACGGGCAGCUUGCCGGUGGUGCAGAUGAACUUCAG | |
| | GGUCAGCUUGCCGUAGGUGGCAUCGCCCUCGCCCUCGCCGGACACGCUGAACUUGUGGCCGUUUAC | |
| | GUCGCCGUCCAGCUCGACCAGGAUGGGCACCACCCCGGUGAACAGCUCCUCGCCCUUGCUCACCAUG | |
| | GUGGCUUUACCAACAGUACCGGAAUGCCAAGCUUGGGUCCUGUGUUCUGGCGGCAAACCCGUUGCG | |
| | AAAAAGAACGUUCACGGCGACUACUGCACUUAUAUACGGUUCUCCCCCACCCUCGGGAAAAAGGCG | |
| | GAGCCAGUACACGACAUCACUUUCCCAGUUUACCCCGCGCCACCUUCUCUAGGCACCGGAUCAAUUG | |
| | CCGACCCCUCCCCCCAACUUCUCGGGGACUGUGGGCGAUGUGCGCUCUGCCCUAGUUGCUUGUGAUU | |
| | UCUUUUCUUUUUUAUUUUAUUUCCAUUAUUUGAAAUGUAUUUGUUGUAGCAAUGCUUUUGACACG | |
| | AAAUAAAUAAA | |
| RNAIVT610 | GGGUGUAUGGGGUGCUCAGGGAGGGGUAGUAUCUCUGGUAUGGAGGGCUUGUCGUGCCCUCCUAGG | 15010 |
| | GCAGCUCUCCAGCCUCUGACCCCCACCUGACACCCAGCUCUCACUUGUGGCUCCCAGUAGCUGCUAG | |
| | CAUGUGGCAGCGGCCACACCCCGGGCAACGGCUUCGACAGGCCGGCUAAACCUUGUGAGGGUAGCC | |
| | AUCGGGUCAUCGACCCCUGGUGAACCAGGGCUUUGCUCACCCAGCAUGUGAAGACUGCUUCGGCUG | |
| | AACAGACGGAAGAAACCAAUAAGAAGGUUCAACGGCUGAGAGGGCGACGCAGCAAAGCACUGUGGA | |
| | GUGCUUAGGGCGUGUUGGAGCACAAAGGACAACACGGCCAUCCAAUGCAGCUGAGGAAGUCUCCAG | |
| | AUGUAACAAUUUUUCGUGCCACUGGACCCAGGCUUCCAACGCCGAGAGAGUGGGACUGUCUCUGUG | |
| | CAUCGGCUUUUCCACUUAAAUCUCUUUCACGCACAAGUAUCUUUGUGCACACUCAUCUAUCCUAAC | |
| | CCCGUCCACCCUCUUCAAGACCUGCGGCGAUGGGGGAGUGGCGACGCAACAGGUGGAGGUGACCAC | |
| | UGGCAGUUGUAGUCACGAUCCUGCACGUAGGCGGCCCACGGACCAGUGGUCGCUCGGCCCUGUGGG | |
| | CAGCAGGGACGUUCGGCAGCAUCCUGGGCGACUGAGCAGCCCUCUCUAGGUUUACGGAUCCGAAUU | |
| | CUCGACGGAUCGAUCCGAACAAACGACCCAACACCCGUGCGUUUUAUUCUGUCUUUUUAUUGCCGA | |
| | UCCCCCGGCCGCUUUACUUGUACAGCUCGUCCAUGCCGAGAGUGAUCCCGGCGGCGGUCACGAACUC | |
| | CAGCAGGACCAUGUGAUCGCGCUUCUCGUUGGGGUCUUUGCUCAGGGCGGACUGGGUGCUCAGGUA | |
| | GUGGUUGUCGGGCAGCAGCACGGGGCCGUCGCCGAUGGGGGUGUUCUGCUGGUAGUGGUCGGCGAG | |
| | CUGCACGCUGCCGUCCUCGAUGUUGUGGCGGAUCUUGAAGUUCACCUUGAUGCCGUUCUUCUGCUU | |
| | GUCGGCCAUGAUAUAGACGUUGUGGCUGUUGUAGUUGUACUCCAGCUUGUGCCCCAGGAUGUUGCC | |
| | GUCCUCCUUGAAGUCGAUGCCCUUCAGCUCGAUGCGGUUCACCAGGGUGUCGCCCUCGAACUUCACC | |
| | UCGGCGCGGGUCUUGUAGUUGCCGUCGUCCUUGAAGAAGAUGGUGCGCUCCUGGACGUAGCCUUCG | |
| | GGCAUGGCGGACUUGAAGAAGUCGUGCUGCUUCAUGUGGUCGGGGUAGCGGCUGAAGCACUGCACG | |
| | CCGUAGGUCAGGGUGGUCACGAGGGUGGGCCAGGGCACGGGCAGCUUGCCGGUGGUGCAGAUGAAC | |
| | UUCAGGGUCAGCUUGCCGUAGGUGGCAUCGCCCUCGCCCUCGCCGGACACGCUGAACUUGUGGCCG | |
| | UUUACGUCGCCGUCCAGCUCGACCAGGAUGGGCACCACCCCGGUGAACAGCUCCUCGCCCUUGCUCA | |
| | CCAUGGUGGCUUUACCAACAGUACCGGAAUGCCAAGCUUGGGUCCUGUGUUCUGGCGGCAAACCCG | |
| | UUGCGAAAAAGAACGUUCACGGCGACUACUGCACUUAUAUACGGUUCUCCCCCACCCUCGGGAAAA | |
| | AGGCGGAGCCAGUACACGACAUCACUUUCCCAGUUUACCCCGCGCCACCUUCUCUAGGCACCGGAUC | |
| | AAUUGCCGACCCCUCCCCCCAACUUCUCGGGGACUGUGGGCGAUGUGCGCUCUGCCCUGAAACUGCA | |
| | CAAAGACAAUAGUCAUUCUCGAUCACCGAGAGACUACCACU | |
| RNAIVT1200 | GGGUGUAUGGGGUGCUCAGGGAGGGGUAGUAUCUCUGGUAUGGAGGGCUUGUCGUGCCCUCCUAGG | 15011 |
| | GCAGCUCUCCAGCCUCUGACCCCCACCUGACACCCAGCUCUCACUUGUGGCUCCCAGUAGCUGCUAG | |
| | CAUGUGGCAGCGGCCACACCCCGGGCAACGGCUUCGACAGGCCGGCUAAACCUUGUGAGGGUAGCC | |
| | AUCGGGUCAUCGACCCCUGGUGAACCAGGGCUUUGCUCACCCAGCAUGUGAAGACUGCUUCGGCUG | |
| | AACAGACGGAAGAAACCAAUAAGAAGGUUCAACGGCUGAGAGGGCGACGCAGCAAAGCACUGUGGA | |
| | GUGCUUAGGGCGUGUUGGAGCACAAAGGACAACACGGCCAUCCAAUGCAGCUGAGGAAGUCUCCAG | |
| | AUGUAACAAUUUUUCGUGCCACUGGACCCAGGCUUCCAACGCCGAGAGAGUGGGACUGUCUCUGUG | |
| | CAUCGGCUUUUCCACUUAAAUCUCUUUCACGCACAAGUAUCUUUGUGCACACUCAUCUAUCCUAAC | |
| | CCCGUCCACCCUCUUCAAGACCUGCGGCGAUGGGGGAGUGGCGACGCAACAGGUGGAGGUGACCAC | |
| | UGGCAGUUGUAGUCACGAUCCUGCACGUAGGCGGCCCACGGACCAGUGGUCGCUCGGCCCUGUGGG | |
| | CAGCAGGGACGUUCGGCAGCAUCCUGGGCGACUGAGCAGCCCUCUCUAGGUUUACGGAUCCGAAUU | |
| | CUCGACGGAUCGAUCCGAACAAACGACCCAACACCCGUGCGUUUUAUUCUGUCUUUUUAUUGCCGA | |
| | UCCCCCGGCCGCUUUAGCGGGGUGGCAAGGCUUGCAUAUGCAACGCAUCAUAAGUGUCCUUGGUGG | |
| | CUGUAGAGAGACCCUGGUACAGACCGUCAUGCCCCUUGCCUCUGCGUCUUUCGCCUUUCAUUCCGA | |
| | UCUCGCUAUAGGCUUCAGCCAUCUUGUCCUUCUGCAGCUCAUUGUACAACCCCUCCUGAGGAUUUU | |
| | UUCUCCGGGGCUUUCCCCCCAUCUCGGGAUCCCUGCCCCGUCUCUUGUCCAGAACAUCGUACUCUUC | |
| | UCGCCUGCCGAGAUUCAAUUCAUUGUAGAGCUGAUUCUGACCCUGCUGAUAUGCGGGAGCAUCGGC | |
| | GCUUCUAGAAAAUUUCACCCUGGAGCGAUAGGCUGCGAAGUCGCGUGGUGGGGCAUAGGGCUGGUA | |
| | AUGCUUGCGGGUGGGCCCGGGGCGGCGGGGAGUCAUGUUCAUGUAGUCACUGUGCAGGAGCCUGCU | |
| | CCUCUUACUCCUACAAUACAGAGUGAUCACAAGGGAGAGAAGCAACACCCCACAUGUUCCGGCCAA | |
| | AGGGGCCCAAAUAUAAAUAUCACACGCGAAGUCCAGGCCUCGCGUAUGGACGGCGCCUCCUGCUGC | |
| | GGGCCUGCAAGCUUCAGGUCUGAGGCUCAAUGGUUGGCUGGCUAUAGUUGGAGCGGGUGUGGGGGG | |
| | CCUUGGAGCAGGUGUUGUGGUCUUGAUCUCCAGUUUGGUCCCCUGACCGAAAGUCCAGGGGACGUG | |
| | ACUGGUCUCUGCACAAUAGUAGACGCCGACGUCCUCAGCCUCGACCCGACUAAUCUUCAGGGUGAA | |
| | AUCGGCACCGCUACCUGAGCCGGAAAAGCGAUCCGGGACCCCGCUGAAACGGUUGGAAACCUUGUA | |
| | GAUCAGGAGCUGUGGACUUUGGCCCGGCUUCUGCAGAUACCAGUGCAGGUAGGUGUUGCCGUUAGA | |
| | GUGGACCAGACUCUGGGAACUCUUGCAGGAGAUGCUCGCCGGCUCACCAGGGGUCACAGACAGAGA | |
| | CAGUGGAGUCUGGGUCAUCACGAUAUCGCUGCCACCCCCUCCAGAGCCACCUCCGCCGGAGCCACCG | |
| | CCACCGGAAGACACUGUCACCAUGGUGCCCUGGCCCCAGACGUCGAAGUACCAGUCAUAAUCAUAC | |
| | AGGGAGGCGCAGAAAUACACGGCGGUAUCUUCGGACCUGAGACUAGACAGCUCCAUGUAUGCCGUA | |
| | GAACUUGACGUGUCGCGGGUCAUGGUAACCCUGCCGGUGAACUUCUGGUUGUACUCAGAGUUUCCG | |
| | CUCGCAAAAUAGAUCCAACCCAUCCACUCGAGUCCCUGCCCGGGAGCCUGCCGCACCCAAUUGAUAU | |
| | AGUAAUCUGGGAAGCUGUAGCCGGAAGCCUUACAGCUCACUUUCACGCUGGCGCCAGGCUUUUUUA | |
| | CCUCCGCGCCGGACUGAACAAGCUGCACCUGCGGGCGAGCGGCAUGCAAGAGCAGGGCAAGAGGCA | |
| | GAAGCAGGGCGGUCACCGGCAGAGCCAUGGUGGCUUUACCAACAGUACCGGAAUGCCAAGCUUGGG | |
| | UCUGGGCUCUUUUAUUGAGCUCGGGGAGCAGAAGCGCGCGAACAGAAGCGAGAAGCGAACUGAUUG | |
| | GUUAGUUCAAAUAAGGCACAGGGUCAUUUCAGGUCCUUGGGGCACCCUGGAAACAUCUGAUGGUUC | |
| | UCUAGAAACUGCUGAGGGCGGGACCGCAUCUGGGGACCAUCUGUUCUUGGCCCUGAGCCGGGGCAG | |
| | GAACUGCUUACCACAGAUAUCCUGUUUGGCCCAUAUUCUGCUGUUCCAACUGUUCUUGGCCCUGAG | |
| | CCGGGGCAGGAACUGCUUACCACAGAUAUCCUGUUUGGCCCAUAUUCUGCUGUCUCUCUGUUCCUA | |
| | ACCUUGAUCCUAGCUUGCCAAACCUACAGGUGGGGUCUUUCAUUCCCCCCUUUUUCUGGAGACUAA | |
| | AUAAAUGAAACUGCACAAAGACAAUAGUCAUUCUCGAUCACCGAGAGACUACCACU | |

TABLE E6
Exemplary UTRᵣₑₜᵣₒ Sequences Used in the Template Sequences of Table E5

| Template | 5′UTRᵣₑₜᵣₒ | 3′UTRᵣₑₜᵣₒ |
|---|---|---|
| RNAIVT354 | GGGGGACACGGAAAGAGCCTCCCCGAAGATTGAGTGAATTCAGTCGGG | TAGTTGCTTGTGATTTCTTTTCTTTTTTAT |
| | CGTCCCCTGGGCAACGTTTCTTGTAAGCGGCCGATCTTTCCACCCCAAA | TTTATTTCCATTATTTGAAATGTATTTGTT |
| | AGCATTGGATGA (SEQ ID NO: 704) | GTAGCAATGCTTTTGACACGAAATAAAT |
| | | AAA (SEQ ID NO: 15455) |
| NAIVT3 | GGGGGACACGGAAAGAGCCTCCCCGAAGATTGAGTGAATTCAGTCGGG | TAGTTGCTTGTGATTTCTTTTCTTTTTTAT |
| | CGTCCCCTGGGCAACGTTTCTTGTAAGCGGCCGATCTTTCCACCCCAAA | TTTATTTCCATTATTTGAAATGTATTTGTT |
| | AGCATTGGATGA (SEQ ID NO: 704) | GTAGCAATGCTTTTGACACGAAATAAAT |
| | | AAA (SEQ ID NO: 15455) |
| RNAIVT610 | GGGTGTATGGGGTGCTCAGGGAGGGGTAGTATCTCTGGTATGGAGGGC | TGAAACTGCACAAAGACAATAGTCATTC |
| | TTGTCGTGCCCTCCTAGGGCAGCTCTCCAGCCTCTGACCCCCACCTGAC | TCGATCACCGAGAGACTACCACT (SEQ ID |
| | ACCCAGCTCTCACTTGTGGCTCCCAGTAGCTGCTAGCATGTGGCAGCGG | NO: 802) |
| | CCACACCCCGGGCAACGGCTTCGACAGGCCGGCTAAACCTTGTGAGGG | |
| | TAGCCATCGGGTCATCGACCCCTGGTGAACCAGGGCTTTGCTCACCCAG | |
| | CATGTGAAGACTGCTTCGGCTGAACAGACGGAAGAAACCAATAAGAAG | |
| | GTTCAACGGCTGAGAGGGCGACGCAGCAAAGCACTGTGGAGTGCTTAG | |
| | GGCGTGTTGGAGCACAAAGGACAACACGGCCATCCAATGCAGCTGAGG | |
| | AAGTCTCCAGATGTAACAATTTTTCGTGCCACTGGACCCAGGCTTCCAA | |
| | CGCCGAGAGAGTGGGACTGTCTCTGTGCATCGGCTTTTCCACTTAAATC | |
| | TCTTTCACGCACAAGTATCTTTGTGCACACTCATCTATCCTAACCCCGTC | |
| | CACCCTCTTCAAGACCTGCGGCGATGGGGGAGTGGCGACGCAACAGGT | |
| | GGAGGTGACCACTGGCAGTTGTAGTCACGATCCTGCACGTAGGCGGCC | |
| | CACGGACCAGTGGTCGCTCGGCCCTGTGGGCAGCAGGGACGTTCGGCA | |
| | GCATCCTGGGCGACTGAGCAGCCCTCTCTAG (SEQ ID NO: 702) | |
| RNAIVT1200 | GGGTGTATGGGGTGCTCAGGGAGGGGTAGTATCTCTGGTATGGAGGGC | TGAAACTGCACAAAGACAATAGTCATTC |
| | TTGTCGTGCCCTCCTAGGGCAGCTCTCCAGCCTCTGACCCCCACCTGAC | TCGATCACCGAGAGACTACCACT (SEQ ID |
| | ACCCAGCTCTCACTTGTGGCTCCCAGTAGCTGCTAGCATGTGGCAGCGG | NO: 802) |
| | CCACACCCCGGGCAACGGCTTCGACAGGCCGGCTAAACCTTGTGAGGG | |
| | TAGCCATCGGGTCATCGACCCCTGGTGAACCAGGGCTTTGCTCACCCAG | |
| | CATGTGAAGACTGCTTCGGCTGAACAGACGGAAGAAACCAATAAGAAG | |
| | GTTCAACGGCTGAGAGGGCGACGCAGCAAAGCACTGTGGAGTGCTTAG | |
| | GGCGTGTTGGAGCACAAAGGACAACACGGCCATCCAATGCAGCTGAGG | |
| | AAGTCTCCAGATGTAACAATTTTTCGTGCCACTGGACCCAGGCTTCCAA | |
| | CGCCGAGAGAGTGGGACTGTCTCTGTGCATCGGCTTTTCCACTTAAATC | |
| | TCTTTCACGCACAAGTATCTTTGTGCACACTCATCTATCCTAACCCCGTC | |
| | CACCCTCTTCAAGACCTGCGGCGATGGGGGAGTGGCGACGCAACAGGT | |
| | GGAGGTGACCACTGGCAGTTGTAGTCACGATCCTGCACGTAGGCGGCC | |
| | CACGGACCAGTGGTCGCTCGGCCCTGTGGGCAGCAGGGACGTTCGGCA | |
| | GCATCCTGGGCGACTGAGCAGCCCTCTCTAG (SEQ ID NO: 702) | |

[1211] Briefly, the RNAIVT354 and RNAIVT381 template RNAs for use with the RNAIVT696 gene modifying polypeptide comprised the following sequences from 5′ to 3′: 5′ UTRᵣₑₜᵣₒ, bGHpA, GFP, Kozak sequence, PGK promoter (RNAIVT354) or EF1a short promoter (RNAIVT381), 3′ UTRᵣₑₜᵣₒ. The RNAIVT610 and RNAIVT1200 template RNAs for use with the RNAIVT1123 gene modifying polypeptide comprised the following sequences from 5′ to 3′: 5′ UTRᵣₑₜᵣₒ, TKpA, GFP (RNAIVT610) or BCMA_CAR (RNAIVT1200), Kozak sequence, EF1a short promoter (RNAIVT610) or MND promoter (RNAIVT1200), 3′ UTRᵣₑₜᵣₒ.

[1212] The heterologous gene modifying system comprising the heterologous gene modifying polypeptide and the template RNA designed to produce an insertion in TRAC described above was transfected either alone or in combination with the retrotransposon gene modifying system comprising the retrotransposon gene modifying polypeptide and a template RNA encoding either GFP or a CAR in activated primary human T cells by nucleofection in RNA format. Prior to nucleofection, T cells were cultured with TexMACS supplemented with 5% human AB Serum, IL2 at 20 IU/ml, IL7 at 10 ng/ml, IL15 at 5 ng/ml in each well at 37° C., 5% CO2 for 2 days and stimulated using T Cell TransAct. For the nucleofection of the heterologous gene modifying system, 2000 ng of heterologous gene modifying polypeptide-encoding mRNA were combined with 1000 ng template RNA in RNA format. For the nucleofection of the gene modifying system, either 800 ng (RNAIVT696 gene modifying polypeptide) or 6.25 ng (RNAIVT1123 gene modifying polypeptide) of mRNA encoding the gene modifying polypeptide were combined with 1000 ng of template RNA in RNA format.

[1213] The RNA mixture (comprising either the heterologous gene modifying system or both the heterologous gene modifying system and the retrotransposon gene modifying systems) was added to 500,000 primary human HSCs in a total of 20 μL of Lonza P3 buffer and T cells were nucleofected in 16-well nucleofection cassettes using program E0-115. After nucleofection, cells incubated at room temperature for 10 minutes and were transferred to 24-well plates containing 500 μL of TexMACS supplemented with 5% human AB Serum, IL2 at 20 IU/ml, IL7 at 10 ng/ml, IL15 at 5 ng/ml in each well and cultured at 37° C., 5% CO2 for 4 days prior to flow cytometry analysis.

[1214] To determine whether insertion by the gene modifying system was successful, flow cytometry was used to determine the fraction of cells expressing GFP or BCMA CAR (as detected by staining cells with fluorescently labeled Recombinant Human BCMA Protein). To analyze cell surface markers representative of different T cells subpopulations, cells were stained with fluorescently labeled anti human CD3, CD8, CD62L, CD45RA antibodies. To determine whether editing of the TRAC locus by the heterologous gene modifying system was successful, CD3 levels were measured as a surrogate readout. Functional loss of TRAC is known to be associated with loss of surface expression of the CD3 complex.

[1215] FIG. 12 shows the levels of editing by the gene modifying system in the bulk T cell population when the cells were transfected with the gene modifying system, either alone or in combination with the heterologous gene modifying system. The results show an average of 2.9% T cells expressing GFP when transfected with RNAIVT696 gene modifying polypeptide and PGK GFP template RNA, an average of 3% T cells expressing GFP when transfected with RNAIVT696 gene modifying polypeptide and EF1a GFP template RNA, an average of 28.1% T cells expressing GFP when transfected with RNAIVT1123 gene modifying polypeptide and EF1a GFP template RNA, and an average of 6.8% T cells expressing BCMA CAR when transfected with RNAIVT1123 gene modifying polypeptide and MND CAR template RNA. When these four configurations of the gene modifying system were delivered in combination with the heterologous gene modifying system, average levels of T cells expressing GFP were 4%, 3.7%, and 24.2% (respectively), and average levels of T cells expressing a CAR were 7%. The results showed that gene modifying systems using either exemplary retrotransposon gene modifying polypeptide achieved insertion of a gene into T cells, and achieved insertion of either of two exemplary genes. The results showed that editing efficiency when inserting whole genes using the gene modifying system is not affected by the co-delivery of a heterologous gene modifying system containing a heterologous gene modifying polypeptide (e.g., directing a short insertion).

[1216] FIG. 13 shows the levels of editing by the heterologous gene modifying system in the bulk T cell population when the cells were transfected with the heterologous gene modifying system, either alone or in combination with the gene modifying system. The results showed an average of 75.3% of T cells lacking expression of CD3, used here as a surrogate marker of TRAC editing, when treated with the heterologous gene modifying system. When the heterologous gene modifying system is delivered in combination with the gene modifying system configured as indicated, levels of CD3 negative T cells were measured in the range of 59.1 to 74.1%. The results showed that heterologous gene modifying systems using an exemplary heterologous gene modifying polypeptide successfully disrupted the TRAC gene in T cells. The results show that editing efficiency when making short edits (e.g., a 5 nucleotide insertion) is not affected by the co-delivery of an exemplary gene modifying system containing a retrotransposon gene modifying polypeptide (e.g., directing a insertion of a gene).

[1217] Following from the experiments of FIG. 13 demonstrating that the levels of editing in the bulk T cell population were unaffected by co-delivery of the systems, FIG. 14 shows the levels of editing by the heterologous gene modifying system (measured here as loss of expression of CD3) when the cells were co-transfected with the heterologous gene modifying system specifically breaking out TRAC editing levels in sub-populations of cells that were edited or not edited by the gene modifying system (that were GFP+ or BCMA CAR+ T cells, or GFP− or BCMA CAR−). The results demonstrated that treating T cells with both the systems results in high level of co-occurrence of the two editing events in the same cell. The similarity in editing level by the heterologous gene modifying system in cells edited or not edited by the gene modifying system further demonstrates that efficiency of editing by the heterologous gene modifying system is not affected by co-delivery of a gene modifying system.

[1218] FIG. 15 shows a phenotypic characterization by flow cytometry of T cells treated with the heterologous gene modifying system, both the heterologous gene modifying system and the gene modifying system, or a mock treatment lacking both systems. Without wishing to be bound by theory, following stimulation, T cells progressively differentiate into memory and terminally differentiated effectors, acquiring effector functions and losing the ability for self-renewal and survival, and concomitant cell surface marker expression changes can be used to monitor said transitions. Stem memory T cells (TSCM) are defined as CD62L+CD45RA+, Central memory (CM) are defined as CD62L+CD45RA−, Effector memory (EM) are defined as CD62L− CD45RA, Terminal effectors (TEMRA) are defined as CD62L− CD45RA+. The distribution of the indicated T cells subpopulations within CD8 and CD4 compartments, comparing mock treated cells, CD3− cells edited with the heterologous gene modifying system and CAR+CD3− cells edited by both the heterologous gene modifying system and the gene modifying system, were graphed in FIG. 15. The results showed no skewing in the distribution of the subpopulations when comparing mock treated cells, cells edited by just the heterologous gene modifying system, and cells edited by both the systems. These results indicated that the two editing events do not impact the differentiation phenotypes of primary human T cells.

### Example 10: Evaluating Combined Gene Editing Activity of Exemplary TRAC Human Template RNAs with Gene Modifying Systems

[1219] This example describes the use of a first exemplary heterologous gene modifying system containing a heterologous gene modifying polypeptide and 2 template RNAs to produce an insertion of 5 nucleotides (TAGTG) in the first exon of the human TRAC gene and an insertion of 5 nucleotides (TAGTG) in the first exon of the Beta 2 Microglobulin (B2M) gene in primary human T cells, and a second exemplary retrotransposon gene modifying system containing a retrotransposon gene modifying polypeptide and a template RNA to insert expression cassettes for a chimeric antigen receptor (CAR) or GFP into the genome of the primary human T cells, as well as quantification of said gene modifying activities. The insertions into TRAC and B2M generated a frameshift that resulted in a non-functional gene (also referred to as a knock-out).

[1220] In this example, the template RNA of the first heterologous gene modifying system contained:
[1221] (1) a gRNA spacer;
[1222] (2) a gRNA scaffold;
[1223] (3) a heterologous object sequence; and
[1224] (4) a primer binding site (PBS) sequence.

[1225] The exemplary template RNAs generated and used in the first heterologous gene modifying system are given in Table E7. Nucleotide modifications are noted as follows: phosphorothioate linkages denoted by an asterisk, 2′-O-methyl groups denoted by an ‘m’ preceding a nucleotide.

TABLE E7
Exemplary Template RNAs and Sequences

| | | | SEQ |
|---|---|---|---|
| Name | Descriptor | Sequence | ID NO |
| RNACS5630 | TRAC4_ | mG*mA*mG*rArArUrCrArArArArUrCrGrGrUrGr | 15,004 |
| | Ins 5 | ArArUrGrUrUrUrUrArGrAmGmCmUmAmGmAmAmAm | |
| | Nick | UmAmGmCrArArGrUrUrArArArArUrArArGrGrCr | |
| | P9R18 | UrArGrUrCrCrGrUrUrArUrCrAmAmCmUmUmGmAm | |
| | | AmAmAmAmGmUmGmGmCmAmCmCmGmAmGmUmCmGmGm | |
| | | UmGmCrCrUrGrUrCrUrGrCrCrUrArUrUrUrArGr | |
| | | UrGrCrArCrCrGrA*mU*mU*mU | |
| RNACS7755 | B2m1_ | mA*mC*mU*rCrArCrGrCrUrGrGrArUrArGrCrCr | 15,005 |
| | P11R18_ | UrCrCrGrUrUrUrUrArGrAmGmCmUmAmGmAmAmAm | |
| | ins5_ | UmAmGmCrArArGrUrUrArArArArUrArArGrGrCr | |
| | nick_v1 | UrArGrUrCrCrGrUrUrArUrCrAmAmCmUmUmGmAm | |
| | | AmAmAmAmGmUmGmGmCmAmCmCmGmAmGmUmCmGmGm | |
| | | UmGmCrUrUrUrCrUrGrGrCrCrUrGrGrArUrGrAr | |
| | | UrGrGrGrCrUrArUrCrC*mA*mG*mC | |

Table E7A shows the sequences of Table E7 without chemical modifications. In some embodiments, the sequences of Table E7A may be used without chemical modifications, or with one or more chemical modifications.

TABLE E7A
Table E7 Sequences without Chemical Modifications

| | | | SEQ |
|---|---|---|---|
| RNACS | Name | Sequence | ID NO |
| RNACS5630 | TRAC4_ | GAGAAUCAAAAUCGGUGAAUGUUUUAGAGCUAGAAAUAGC | 15,006 |
| | Ins5 | AAGUUAAAAUAAGGCUAGUCCGUUAUCAACUUGAAAAAGU | |
| | Nick | GGCACCGAGUCGGUGCCUGUCUGCCUAUUUAGUGCACCGA | |
| | P9R18 | UUU | |
| RNACS7755 | B2m1_ | ACUCACGCUGGAUAGCCUCCGUUUUAGAGCUAGAAAUAGC | 15,007 |
| | P11R18_ | AAGUUAAAAUAAGGCUAGUCCGUUAUCAACUUGAAAAAGU | |
| | ins5_ | GGCACCGAGUCGGUGCUUUCUGGCCUGGAUGAUGGGCUAU | |
| | nick_v1 | CCAGC | |

[1226] In this example, exemplary heterologous gene modifying polypeptides of the first heterologous gene modifying system contained:
[1227] (1) an endonuclease and/or DNA binding domain;
[1228] (2) a peptide linker; and
[1229] (3) a reverse transcriptase (RT) domain,
   where (1), (2), and (3) are heterologous to each other. Accordingly, the first heterologous gene modifying polypeptides in this Example were examples of heterologous gene modifying polypeptides.

[1230] The exemplary gene heterologous modifying polypeptide of the first gene modifying system was RNAIVT1564, and comprised the amino acid sequence indicated in Table E8.

TABLE E8
Exemplary heterologous gene modifying polypeptide and Sequence

| Name | AA sequence | SEQ ID NO |
|---|---|---|
| RNAIVT1564 | MPAAKRVKLDGGDKKYSIGLDIGTNSVGWAVITDEYKVPSK | 15,008 |
| | KFKVLGNTDRHSIKKNLIGALLFDSGETAEATRLKRTARRRY | |
| | TRRKNRICYLQEIFSNEMAKVDDSFFHRLEESFLVEEDKKHER | |
| | HPIFGNIVDEVAYHEKYPTIYHLRKKLVDSTDKADLRLIYLAL | |
| | AHMIKFRGHFLIEGDLNPDNSDVDKLFIQLVQTYNQLFEENPI | |
| | NASGVDAKAILSARLSKSRRLENLIAQLPGEKKNGLFGNLIAL | |
| | SLGLTPNFKSNFDLAEDAKLQLSKDTYDDDLDNLLAQIGDQY | |
| | ADLFLAAKNLSDAILLSDILRVNTEITKAPLSASMIKRYDEHH | |
| | QDLTLLKALVRQQLPEKYKEIFFDQSKNGYAGYIDGGASQEE | |
| | FYKFIKPILEKMDGTEELLVKLNREDLLRKQRTFDNGSIPHQI | |
| | HLGELHAILRRQEDFYPFLKDNREKIEKILTFRIPYYVGPLARG | |
| | NSRFAWMTRKSEETITPWNFEEVVDKGASAQSFIERMTNFDK | |
| | NLPNEKVLPKHSLLYEYFTVYNELTKVKYVTEGMRKPAFLSG | |
| | EQKKAIVDLLFKTNRKVTVKQLKEDYFKKIECFDSVEISGVED | |
| | RFNASLGTYHDLLKIIKDKDFLDNEENEDILEDIVLTLTLFEDR | |
| | EMIEERLKTYAHLFDDKVMKQLKRRRYTGWGRLSRKLINGI | |
| | RDKQSGKTILDFLKSDGFANRNFMQLIHDDSLTFKEDIQKAQ | |
| | VSGQGDSLHEHIANLAGSPAIKKGILQTVKVVDELVKVMGRH | |
| | KPENIVIEMARENQTTQKGQKNSRERMKRIEEGIKELGSQILK | |
| | EHPVENTQLQNEKLYLYYLQNGRDMYVDQELDINRLSDYDV | |
| | DHIVPQSFLKDDSIDNKVLTRSDKARGKSDNVPSEEVVKKMK | |
| | NYWRQLLNAKLITQRKFDNLTKAERGGLSELDKAGFIKRQLV | |
| | ETRQITKHVAQILDSRMNTKYDENDKLIREVKVITLKSKLVSD | |
| | FRKDFQFYKVREINNYHHAHDAYLNAVVGTALIKKYPKLESE | |
| | FVYGDYKVYDVRKMIAKSEQEIGKATAKYFFYSNIMNFFKTE | |
| | ITLANGEIRKRPLIETNGETGEIVWDKGRDFATVRKVLSMPQV | |
| | NIVKKTEVQTGGFSKESILPKRNSDKLIARKKDWDPKKYGGF | |
| | DSPTVAYSVLVVAKVEKGKSKKLKSVKELLGITIMERSSFEK | |
| | NPIDFLEAKGYKEVKKDLIIKLPKYSLFELENGRKRMLASAGE | |
| | LQKGNELALPSKYVNFLYLASHYEKLKGSPEDNEQKQLFVEQ | |
| | HKHYLDEIIEQISEFSKRVILADANLDKVLSAYNKHRDKPIRE | |
| | QAENIIHLFTLTNLGAPAAFKYFDTTIDRKRYTSTKEVLDATLI | |
| | HQSITGLYETRIDLSQLGGDSGGSSGGSSGSETPGTSESATPES | |
| | SGGSSGGSSTLNIEDEYRLHETSKEPDVSLGSTWLSDFPQAWA | |
| | ETGGMGLAVRQAPLIIPLKATSTPVSIKQYPMSQEARLGIKPHI | |
| | QRLLDQGILVPCQSPWNTPLLPVKKPGTNDYRPVQDLREVNK | |
| | RVEDIHPTVPNPYNLLSGLPPSHQWYTVLDLKDAFFCLRLHPT | |
| | SQPLFAFEWRDPEMGISGQLTWTRLPQGFKNSPTLFNEALHR | |
| | DLADFRIQHPDLILLQYVDDLLLAATSELDCQQGTRALLQTL | |
| | GNLGYRASAKKAQICQKQVKYLGYLLKEGQRWLTEARKET | |
| | VMGQPTPKTPRQLREFLGKAGFCRLFIPGFAEMAAPLYPLTKP | |
| | GTLFNWGPDQQKAYQEIKQALLTAPALGLPDLTKPFELFVDE | |
| | KQGYAKGVLTQKLGPWRRPVAYLSKKLDPVAAGWPPCLRM | |
| | VAAIAVLTKDAGKLTMGQPLVILAPHAVEALVKQPPDRWLS | |
| | NARMTHYQALLLDTDRVQFGPVVALNPATLLPLPEEGLQHN | |
| | CLDILAEAHGTRPDLTDQPLPDADHTWYTDGSSLLQEGQRKA | |
| | GAAVTTETEVIWAKALPAGTSAQRAELIALTQALKMAEGKK | |
| | LNVYTDSRYAFATAHIHGEIYRRRGWLTSEGKEIKNKDEILAL | |
| | LKALFLPKRLSIIHCPGHQKGHSAEARGNRMADQAARKAAIT | |
| | ETPDTSTLLIENSSPSGGSKRTADGSEFEKRTADGSEFESPKKK | |
| | AKVE | |

[1231] In this example, exemplary gene modifying polypeptides of the second retrotransposon gene modifying system contained:
[1232] (3) an endonuclease and/or DNA binding domain; and
[1233] (4) a reverse transcriptase (RT) domain,
   where (1) and (2) are both derived from a retrotransposon (and in this Example, from the same retrotransposons). Accordingly, the second gene modifying polypeptides in this Example were examples of retrotransposon gene modifying polypeptides.

[1234] The second retrotransposon gene modifying system used in this Example comprised either of two exemplary retrotransposon gene modifying polypeptides: RNAIVT696 (SEQ ID NO: 15,002) and RNAIVT1123 (SEQ ID NO: 15,003), and amino acid sequences are given in Table E9.

TABLE E9
Exemplary gene modifying polypeptide and Sequences

| Name | | SEQ ID |
|---|---|---|
| RNAI | AA sequence | NO |
| VT696 | MDEYQRSLSRPLLTIMSINIEGLSLAKEELLAKMSEDISCDILCIQET | 15,002 |
| | HRDITMRRPKILGMQLAVERPHRQYGSAIFVRSGVAISATSLTEVN | |
| | NIEILSVELDSCTVSSLYKPPGADFYFTPPTSCHNHEAHFVVGDENS | |
| | HSCVWGYDEDDRNGEAVLTWADNSRMSLLHDSKLPPSFNSGRW | |
| | KRGYNPDLIFVKESISHQCTKRVLNPIPNTQHRPICCVAYAAVRPK | |
| | SVPFRRRYNFNKANWTKFTETLEAAISDIEPSIENYDLFVEAVKRSS | |
| | RLSIPRGCRTSYLPGLNEESLNQLQEYLRLFQENPYSDGTIAAGQK | |
| | LSTALANAKKDRWIELLENLDMSKSSRKAWQLLRRLDSDPLVNP | |
| | GHANVTPDQIAHQLIQNGKTNCSRIKMKINRVPELETHQLSSPLNL | |
| | KELREAIKRCKTGKAPGLDDLMMEQIKHLGAKAENWLLKFYNQC | |
| | LAHKQIPRAWRKTKIIAILKPGKDASNARNYRPISLLCHLYKVYER | |
| | MLLNRLGPVIEPKLIAQQAGFRPGKNCTGQILHLTEHIEEGYEKGCI | |
| | TGTVFVDLTAAYDTVQHRKMLHKVYHITRDFDFTKTVQTLLENR | |
| | SFYVEFQGQKSRWRRQKNGLPQGSVLAPTLFNIFTNDQPQPPLTKS | |
| | FIYADDLGLTTQAKDFETVEKQLTNALKDLSSYYKENHLKPNPAK | |
| | TQVCAFHLRNREANRKLKVTWEGQELEHCFHPKYLGVTLDRTLT | |
| | YRKHCMNTKHKVAARNNILRKLTGSAWGADPQVIRTSALALSFS | |
| | TAEYACPVWHKSAHAKQVDIALNETCRIITGCLKPTPVDKLYKLA | |
| | GIAPPDVRREVAANGERKKVEHCESHPLHGYHPPPTRLKSRKGFM | |
| | RTTTPLDVPPAAARVSLWAAKPGNSNWMAPQEGLPPGANQEWA | |
| | TWKSLNRLRSGVGRSKDNLARWHYLEESSTLCDCGAEQTTQHM | |
| | YACPQCPASCTEEELFKATDNAVAVARFWSKTIGGGSPKKKRKVS | |
| | GSETPGTSESATPESVSGWRLFKKIS | |
| RNAIVT1123 | MDSTAHPNQGRGLEKVSQTLPALQTPGQHTAAGGSSPLSGRNQR | 15,003 |
| | KNTKKLLLGAWNIRTLLDRENTPRPERRTALIGKELARYNIDIAAL | |
| | SETRLPEEGSLSEPTTGYTFFWKGRASNEDRIHGVGLAIKTSLLKQ | |
| | LPDLPVGISERLMKIRLPLSKDRYATIISAYAPTLTSTEETIEQFYSD | |
| | LSAVLHSVPTNDKLILLGDFNARVGQDHERWKGVLGKHGVGKM | |
| | NNNGLLLLSKCSEFELTITNTVFRMANKYKTTWMHPRSKQWHLI | |
| | DYIIVRRRDIQDVKITRAMRGAECWTDHRLVRATLQMRIAPRHPK | |
| | RAQTVRAFYNVSRLRDPSYLQTFQSCLDDKLSAKGPLTGSSTEKW | |
| | NQFRDAVKETSKAVLGPKQRNHQDWFDENNTAIEDLLSKKNKAF | |
| | MEWQNNPNSAPKKDRFKSLQATAQREIRKMQDRWWEKKAEEIQ | |
| | RFADMKNYKQFFSALKTVYGPLKPTTTPLLSSDGDTLIKDKKGISN | |
| | RWKEHFSQLLNRPSSVDQSALDQIPQNRTIEQLDVPPSIEEVQKAIK | |
| | QMSAGKAPGKDGIPTEVYKALNGKALQAFHIVLTSIWEEEDMPPE | |
| | LRDASIVALYKNKGSRAACDNYRGISLLSTAGKILARVILNRLLSS | |
| | VSEQNLPESQCGFRPDRSTIDMVFTVRQMQEKCLEQNLSLYIVFID | |
| | LTKAFDTVNRDALWVILSKLGCPAKFVKLIQLFHVDMTGEVLSGG | |
| | ETSDRFNISNGVKQGCVLAPVLFNLFFTQVLRHAVMDLDLGVYIK | |
| | YRLDGSLFDLRRLTAKTKTTERLILEALFADDCALMAHQENHLQT | |
| | IVDRFSTATKLFGLTISLSKTEVLFQPAPGRPTNQPCITIDGTQLSNV | |
| | NTFKYLGSTIANDGSLDHEINARIQKASQALGRLRCKVLQHRGVS | |
| | TATKLKVYNAVVLSSLLYGCETWTLYRKHMKQLEQFHQRSLRSI | |
| | MRIRWQDRITNQEVLDRANSTSIEVMVLKTQLRWSGHVIRMDPQ | |
| | RIPRQVFYGELSAGLRKQGRPKKRFKDQLKSNLKWAGITPKQLEL | |
| | AASDRSSWRTHINHAATTFEDERRRRLAAARERRHQATTAPPVTT | |
| | GVPCPMCHKLCASAFGLQSHMRVHRRSGSETPGTSESATPESVSG | |
| | WRLFKKIS | |

[1235] Exemplary templates RNAs comprising sequences capable of binding the exemplary retrotransposon gene modifying polypeptides included RNAIVT381 for RNAIVT696 gene modifying polypeptide and RNAIVT610 and RNAIVT1200 for RNAIVT1123 gene modifying polypeptide. Sequences are given in Table E10.

TABLE E10
Exemplary retrotransposon gene modifying RNA template and Sequences

| | | SEQ ID |
|---|---|---|
| Name | RNA sequence (5′ to 3′) | NO |
| RNAIVT381 | gggggacacggaaagagccuccccgaagauugagugaauucagucgggcguccccuggg | 15,009 |
| | caacguuucuuguaageggccgaucuuuccaccccaaaagcauuggaugaGUUUAC | |
| | GGAUCCGAAUUCUCGACGGAUCGAUCCGAACAAACGACC | |
| | CAACACCCGUGCGUUUUAUUCUGUCUUUUUAUUGCCGAU | |
| | CCCCCGGCCGCUUUACUUGUACAGCUCGUCCAUGCCGAGA | |
| | GUGAUCCCGGCGGCGGUCACGAACUCCAGCAGGACCAUG | |
| | UGAUCGCGCUUCUCGUUGGGGUCUUUGCUCAGGGCGGAC | |
| | UGGGUGCUCAGGUAGUGGUUGUCGGGCAGCAGCACGGGG | |
| | CCGUCGCCGAUGGGGGUGUUCUGCUGGUAGUGGUCGGCG | |
| | AGCUGCACGCUGCCGUCCUCGAUGUUGUGGCGGAUCUUG | |
| | AAGUUCACCUUGAUGCCGUUCUUCUGCUUGUCGGCCAUG | |
| | AUAUAGACGUUGUGGCUGUUGUAGUUGUACUCCAGCUUG | |
| | UGCCCCAGGAUGUUGCCGUCCUCCUUGAAGUCGAUGCCC | |
| | UUCAGCUCGAUGCGGUUCACCAGGGUGUCGCCCUCGAAC | |
| | UUCACCUCGGCGCGGGUCUUGUAGUUGCCGUCGUCCUUG | |
| | AAGAAGAUGGUGCGCUCCUGGACGUAGCCUUCGGGCAUG | |
| | GCGGACUUGAAGAAGUCGUGCUGCUUCAUGUGGUCGGGG | |
| | UAGCGGCUGAAGCACUGCACGCCGUAGGUCAGGGUGGUC | |
| | ACGAGGGUGGGCCAGGGCACGGGCAGCUUGCCGGUGGUG | |
| | CAGAUGAACUUCAGGGUCAGCUUGCCGUAGGUGGCAUCG | |
| | CCCUCGCCCUCGCCGGACACGCUGAACUUGUGGCCGUUUA | |
| | CGUCGCCGUCCAGCUCGACCAGGAUGGGCACCACCCCGGU | |
| RNAIVT610 | GAACAGCUCCUCGCCCUUGCUCACCAUGGUGGCUUUACC | 15,010 |
| | AACAGUACCGGAAUGCCAAGCUUGGGUCcuguguucuggcggcaa | |
| | acccguugcgaaaaagaacguucacggcgacuacugcacuuauauacgguucucccccac | |
| | ccucgggaaaaaggcggagccaguacacgacaucacuuucccaguuuaccccgcgccacc | |
| | uucucuaggcaccggaucaauugccgaccccuccccccaacuucucggggacugugggc | |
| | uauuugaaauguauuuguuguagcaaugcuuuugacacgaaauaaauaaa | |
| | ggguguauggggugcucagggagggguaguaucucugguauggagggcuugucgugc | |
| | ccuccuagggcagcucuccagccucugacccccaccugacacccagcucucacuuguggc | |
| | ucccaguagcugcuagcauguggcagcggccacaccccgggcaacggcuucgacaggcc | |
| | ggcuaaaccuugugaggguagccaucgggucaucgaccccuggugaaccagggcuuugc | |
| | ucacccagcaugugaagacugcuucggcugaacagacggaagaaaccaauaagaagguuc | |
| | aacggcugagagggcgacgcagcaaagcacuguggagugcuuagggcguguuggagcac | |
| | aaaggacaacacggccauccaaugcagcugaggaagucuccagauguaacaauuuuucg | |
| | ugccacuggacccaggcuuccaacgccgagagagugggacugucucugugcaucggcuu | |
| | uuccacuuaaaucucuuucacgcacaaguaucuuugugcacacucaucuauccuaacccc | |
| | guccacccucuucaagaccugcggcgaugggggaguggcgacgcaacagguggagguga | |
| | ccacuggcaguuguagucacgauccugcacguaggggcccacggaccaguggucgcuc | |
| | ggcccugugggcagcagggacguucggcagcauccugggcgacugagcagcccucucua | |
| | gguuuacggauccgaauucucgacggaucgauccgaacaaacgacccaacacccgugcgu | |
| | gccgagagugaucccggcggcggucacgaacuccagcaggaccaugugaucgcgcuucu | |
| | cguuggggucuuugcucagggggacugggugcucagguagugguugucgggcagca | |
| | gcacggggccgucgccgauggggguguucugcugguaguggucggcgagcugcacgcu | |
| | ucggccaugauauagacguuguggcuguuguaguuguacuccagcuugugccccagga | |
| | uguugccguccuccuugaagucgaugcccuucagcucgaugcgguucaccaggguguc | |
| | gcccucgaacuucaccucggggggucuuguaguugccgucguccuugaagaagaugg | |
| | ugcgcuccuggacguagccuucgggcauggcggacuugaagaagucgugcugcuucau | |
| | guggucgggguagcggcugaagcacugcacgccguaggucaggguggucacgagggug | |
| | ggccagggcacgggcagcuugccgguggugcagaugaacuucagggucagcuugccgu | |
| | agguggcaucgcccucgcccucgccggacacgcugaacuuguggccguuuacgucgccg | |
| | uccagcucgaccaggaugggcaccaccccggugaacagcuccucgcccuugcucaccaug | |
| | guggcuuuaccaacaguaccggaaugccaagcuuggguccuguguucuggcggcaaacc | |
| | cguugcgaaaaagaacguucacggcgacuacugcacuuauauacgguucucccccacccu | |
| | cgggaaaaaggcggagccaguacacgacaucacuuucccaguuuaccccgcgccaccuuc | |
| | ucuaggcaccggaucaauugccgaccccuccccccaacuucucggggacugugggcgau | |
| | gugcgcucugcccugaaacugcacaaagacaauagucauucucgaucaccgagagacuac | |
| | cacu | |
| RNAIVT1200 | ggguguauggggugcucagggagggguaguaucucugguauggagggcuugucgugc | 15,011 |
| | ccuccuagggcagcucuccagccucugacccccaccugacacccagcucucacuuguggc | |
| | ucccaguagcugcuagcauguggcagcggccacaccccgggcaacggcuucgacaggcc | |
| | ggcuaaaccuugugaggguagccaucgggucaucgaccccuggugaaccagggcuuugc | |
| | ucacccagcaugugaagacugcuucggcugaacagacggaagaaaccaauaagaagguuc | |
| | aacggcugagagggcgacgcagcaaagcacuguggagugcuuagggcguguuggagcac | |
| | ugccacuggacccaggcuuccaacgccgagagagugggacugucucugugcaucggcuu | |
| | uuccacuuaaaucucuuucacgcacaaguaucuuugugcacacucaucuauccuaacccc | |
| | guccacccucuucaagaccugcggcgaugggggaguggcgacgcaacagguggagguga | |
| | ccacuggcaguuguagucacgauccugcacguaggggcccacggaccaguggucgcuc | |
| | ggcccugugggcagcagggacguucggcagcauccugggcgacugagcagcccucucua | |
| | gguuuacggauccgaauucucgacggaucgauccgaacaaacgacccaacacccgugcgu | |
| | cauaugcaacgcaucauaaguguccuugguggcuguagagagacccugguacagaccgu | |
| | uccccccaucucgggaucccugccccgucucuuguccagaacaucguacucuucucgcc | |
| | ugccgagauucaauucauuguagagcugauucugacccugcugauaugcgggagcaucg | |
| | gcgcuucuagaaaauuucacccuggagcgauaggcugcgaagucgcgugguggggcaua | |
| | gggcugguaaugcuugcggggggcccggggggggggagucauguucauguaguca | |
| | cugugcaggagccugcuccucuuacuccuacaauacagagugaucacaagggagagaag | |
| | caacaccccacauguuccggccaaaggggcccaaauauaaauaucacacgcgaaguccag | |
| | gccucgcguauggacggcgccuccugcugcgggccugcaagcuucaggucugaggcuca | |
| | augguuggcuggcuauaguuggagggguguggggggccuuggagcagguguugugg | |
| | ucuugaucuccaguuugguccccugaccgaaaguccaggggacgugacuggucucugca | |
| | caauaguagacgccgacguccucagccucgacccgacuaaucuucagggugaaaucggca | |
| | ccgcuaccugagccggaaaagcgauccgggaccccgcugaaacgguuggaaaccuugua | |
| | gaucaggagcuguggacuuuggcccggcuucugcagauaccagugcagguagguguug | |
| | ccguuagaguggaccagacucugggaacucuugcaggagaugcucgccggcucaccagg | |
| | ggucacagacagagacaguggagucugggucaucacgauaucgcugccacccccuccag | |
| | agccaccuccgccggagccaccgccaccggaagacacugucaccauggugcccuggcccc | |
| | agacgucgaaguaccagucauaaucauacagggaggcgcagaaauacacggcgguaucu | |
| | ucggaccugagacuagacagcuccauguaugccguagaacuugacgugucgcgggucau | |
| | gguaacccugccggugaacuucugguuguacucagaguuuccgcucgcaaaauagaucc | |
| | aacccauccacucgagucccugcccgggagccugccgcacccaauugauauaguaaucug | |
| | uccgcgccggacugaacaagcugcaccugcgggcgagcggcaugcaagagcagggcaag | |
| | aggcagaagcagggcggucaccggcagagccaugguggcuuuaccaacaguaccggaau | |
| | gccaagcuugggucugggcucuuuuuugagcucggggagcagaagcgcgcgaacagaa | |
| | gcgagaagcgaacugauugguuaguucaaauaaggcacagggucauuucagguccuugg | |
| | ggcacccuggaaacaucugaugguucucuagaaacugcugaggggggaccgcaucugg | |
| | ggaccaucuguucuuggcccugagccggggcaggaacugcuuaccacagauauccuguu | |
| | gcuugccaaaccuacagguggggucuuucauuccccccuuuuucuggagacuaaaaaa | |
| | ugaaacugcacaaagacaauagucauucucgaucaccgagagacuaccacu | |

[1236] Briefly, the RNAIVT381 template RNAs for use with the RNAIVT696 retrotransposon gene modifying polypeptide comprised the following sequences from 5′ to 3′. 5′ UTR, bGHpA, GFP, Kozak sequence, EF1a short promoter, 3′ UTR. The RNAIVT610 and RNAIVT1200 template RNAs for use with the RNAIVT1123 gene modifying polypeptide comprised the following sequences from 5′ to 3′: 5′ UTR, TKpA, GFP (RNAIVT610) or BCMA_CAR (RNAIVT1200), Kozak sequence, EF1a short promoter (RNAIVT610) or MND promoter (RNAIVT1200), 3′ UTR.

[1237] Activated primary human T cells were nucleofected with 1) the second retrotransposon gene modifying system containing a template RNA encoding either GFP or a CAR, 2) the second retrotransposon gene modifying system containing a template RNA encoding either GFP or a CAR and the first heterologous gene modifying system containing a template RNA designed to produce an insertion in TRAC or B2M, or 3) the second retrotransposon gene modifying system containing a template RNA encoding either GFP or a CAR and the first heterologous gene modifying system containing a template RNA designed to produce an insertion in TRAC and a template RNA designed to produce an insertion in B2M. The gene modifying systems were delivered in RNA format. Prior to nucleofection, T cells were cultured with TexMACS supplemented with 5% human AB Serum, IL2 at 20 IU/ml, IL7 at 10 ng/ml, IL15 at 5 ng/ml in each well at 37° C., 5% C02 for 2 days and stimulated using T Cell TransAct. For the nucleofection of the first heterologous gene modifying system, 1000 ng of heterologous gene modifying polypeptide encoding mRNA were combined with each of the 1000 ng template RNAs in RNA format. For the nucleofection of the second retrotransposon gene modifying system, either 800 ng (RNAIVT696 retrotransposon gene modifying polypeptide) or 6.25 ng (RNAIVT1123 retrotransposon gene modifying polypeptide) of mRNA encoding the retrotransposon gene modifying polypeptide were combined with 1000 ng of template RNA in RNA format.

[1238] The RNA mixture (comprising either the first heterologous gene modifying system or both the first heterologous and second retrotransposon gene modifying systems) was added to 500,000 primary human T cells in a total of 20 μL of Lonza P3 buffer and T cells were nucleofected in 16-well nucleofection cassettes using program DS-130. After nucleofection, cells incubated at room temperature for 10 minutes and were transferred to 24-well plates containing 500 μL of TexMACS supplemented with 5% human AB Serum, IL2 at 20 IU/ml, IL7 at 10 ng/ml, IL15 at 5 ng/ml in each well and cultured at 37° C., 5% C02 for 4 days prior to flow cytometry analysis.

[1239] To determine whether insertion by the second retrotransposon gene modifying system was successful, flow cytometry was used to determine the fraction of cells expressing GFP or BCMA CAR as detected by staining cells with fluorescently labeled Recombinant Human BCMA Protein. To analyze cell surface markers representative of different T cells subpopulations, cells were stained with fluorescently labeled anti human CD3, CD8, CD62L, CD45RA antibodies. To determine whether editing of the TRAC locus by the first heterologous gene modifying system was successful, CD3 levels were measured by flow cytometry as a surrogate readout. Functional loss of TRAC is known to be associated with loss of surface expression of the CD3 complex. To determine whether editing of the B2M locus by the first heterologous gene modifying system was successful, expression of B2M was measured by flow cytometry.

[1240] To measure T cell effector functions, expression of TNFa, IL2 and IFNy cytokines was measured upon stimulation. Specifically, edited T cells were stimulated for 6 hours with PMA (50 ng/ml) and Ionomycin (1 μg/ml) in presence of 1 μl/ml of Golgi Transport Inhibitor. Cells were then stained for surface antigens, fixed and permeabilized using Cytofix/Cytoperm Kit (BD) according to the manufacturer's instruction. After fixation and permeabilization, cells were stained using antibodies recognizing human TNFa, IL2, and IFNy cytokines.

[1241] FIG. 17 shows the levels of editing by the second retrotransposon gene modifying system in the bulk T cell population when the cells were transfected with the second retrotransposon gene modifying system, either alone or in combination with the first heterologous gene modifying system. The results show an average of 5.1% T cells expressing GFP when transfected with RNAIVT696 retrotransposon gene modifying polypeptide and EF1A GFP template RNA, an average of 28.8% T cells expressing GFP when transfected with RNAIVT1123 retrotransposon gene modifying polypeptide and EF1a GFP template RNA, and an average of 10.5% T cells expressing BCMA CAR when transfected with RNAIVT1123 retrotransposon gene modifying polypeptide and MND CAR template RNA. When these 3 configurations of the second retrotransposon gene modifying system were delivered in combination with the first heterologous gene modifying system (targeting TRAC, B2M, or both loci), average levels of T cells expressing GFP or CAR were not significantly changed. For example, in the condition where both TRAC and B2M are edited, the results show an average of 7.6% T cells expressing GFP for RNAIVT696+EF1A GFP template RNA, an average of ˜28% T cells expressing GFP for RNAIVT1123+EF1a GFP template RNA, and an average of 10.9% T cells expressing BCMA CAR for RNAIVT1123+MND CAR template RNA. The results showed that gene modifying systems inserting whole genes can function in combination with gene modifying systems directing other edits (e.g., short insertions). The results further showed that editing efficiency when inserting whole genes using the second retrotransposon gene modifying system is not affected by the co-delivery of another exemplary gene modifying system containing a heterologous gene modifying polypeptide which directs one or multiple edits (e.g. short insertions).

[1242] FIG. 18 shows the levels of editing by the first heterologous gene modifying system (containing a template RNA designed to produce an insertion in TRAC and a template RNA designed to produce an insertion in B2M) in the bulk T cell population when the cells were transfected with the first heterologous gene modifying system either alone or in combination with the second retrotransposon gene modifying system. The results showed an average of 95.8% of cells were edited at one or both of the TRAC or B2M loci when treated with the first heterologous gene modifying system as measured by flow cytometry. Specifically, 77% of cells showed editing in both TRAC (measured by lack of expression of CD3) and B2M, 4.3% of cells showed editing only in TRAC and 14.5% of cells showed editing only in B2M. When the first heterologous gene modifying system was delivered in combination with the second retrotransposon gene modifying system, levels of CD3 negative T cells were measured in the range of 94.9 to 78.21% and the levels of editing of both TRAC and B2M in the range of 74.2 to 46.3%. The results showed that gene modifying systems using an exemplary heterologous gene modifying polypeptide successfully disrupted both the TRAC and B2M genes in T cells. These results further show that heterologous gene modifying systems produce edits sufficient to knock out gene function when used in combination with an additional retrotransposon gene modifying systems designed to produce whole gene insertions. The results show that editing efficiency when making multiple short edits (e.g., multiple 5 nucleotide insertions) is not substantially affected by the co-delivery of another exemplary gene modifying system containing a retrotransposon gene modifying polypeptide (e.g., directing a insertion of a gene).

[1243] FIG. 19 shows the levels of cells edited by the first heterologous gene modifying system (measured here as combined loss of expression of CD3 and B2M by flow cytometry) and also edited by the second retrotransposon gene editing system (that were GFP+ or BCMA CAR+ T cells). The results demonstrated that treating T cells with both the first and second gene modifying systems results in substantial levels of co-occurrence of the three editing events in the same cells. For example, the results showed an average of ˜6% T cells lacking TRAC and B2M and also expressing GFP for RNAIVT696+EF1A GFP template RNA, an average of ˜16% T cells lacking TRAC and B2M and also expressing GFP for RNAIVT1123+EF1a GFP template RNA, and an average of ˜7% T cells lacking TRAC and B2M and also expressing BCMA CAR for RNAIVT1123+MND CAR template RNA.

[1244] FIG. 20 shows a phenotypic characterization by flow cytometry of T cells treated with the first heterologous gene modifying system (containing a template RNA designed to produce an insertion in TRAC and a template RNA designed to produce an insertion in B2M), both the first heterologous and second retrotransposon gene modifying systems, or a mock treatment lacking both gene modifying systems. Without wishing to be bound by theory, following stimulation, T cells progressively differentiate into memory and terminally differentiated effectors, acquiring effector functions and losing the ability for self-renewal and survival, and concomitant cell surface marker expression changes can be used to monitor said transitions. Stem memory T cells (TSCM) are defined as CD62L+CD45RA+, Central memory (CM) are defined as CD62L+CD45RA−, Effector memory (TEM) are defined as CD62L− CD45RA−, Terminal effectors (TEMRA) are defined as CD62L− CD45RA+. The distribution of the indicated T cells subpopulations within CD8 and CD4 compartments, comparing mock treated cells, CD3− B2M− cells edited with the first heterologous gene modifying system and CAR+CD3− B2M− cells edited by both the first heterologous and the second retrotransposon gene modifying systems, were graphed in FIG. 20. The results showed no substantial skewing in the distribution of the TSCM, CM, TEM, and TEMRA subpopulations when comparing mock treated cells, cells edited by just the first heterologous gene modifying system comprising both TRAC and B2M edits, and cells edited by both the first heterologous and second retrotransposon gene modifying systems. These results demonstrated that co-occurrence of three editing events (e.g., two by the first heterologous gene modifying system and one by the second retrotransposon gene modifying system) does not impact the differentiation phenotypes of primary human T cells.

[1245] FIG. 21 shows a functional characterization by flow cytometry of T cells treated with the first heterologous gene modifying system (containing a template RNA designed to produce an insertion in TRAC and a template RNA designed to produce an insertion in B2M), both the first heterologous and second retrotransposon gene modifying systems, or a mock treatment lacking both gene modifying systems. Expression of cytokines (such as TNFa, IL2, IFNy) is a prerequisite for T cells to perform effector functions. The results showed no substantial alteration in the fraction of T cells capable of secreting the indicated cytokines when comparing mock treated cells, cells edited by just the first heterologous gene modifying system comprising both edits, and cells edited by both the first heterologous and second retrotransposon gene modifying systems. These results demonstrated that co-occurrence of three editing events (e.g., two by the first heterologous gene modifying system and one by the second retrotransposon gene modifying system) does not impact the basal effector functions of primary human T cells.

### Example 11: Evaluating Translocation Post Multiplexed Gene Editing

[1246] This example compares the use exemplary heterologous gene modifying systems containing (i) a heterologous gene modifying polypeptide comprising either (a) a wild type (WT) Cas9-RT fusion protein or (b) an exemplary gene modifying polypeptide; and (ii) and 2 template RNAs to produce an insertion of 5 nucleotides in the human TRAC gene and an insertion of 5 nucleotides in the Beta 2 Microglobulin (B2M) gene in activated T cells, as well as evaluation of said gene modifying activities for translocation events.

[1247] Table E11 shows the reagents and components used in two gene modifying systems and control (mock) groups. Sequences of the reagents listed in this table are provided in Tables E12 and E13.

TABLE E11
Experimental conditions

| Gene Modifying | Reagents | |
|---|---|---|
| system | used | Description |
| Gene Modifying | RNAIVT1573, | WTCas9-RT + TRAC sgRNA + |
| System 1 | RNACS6527, | B2M sgRNA |
| | RNACS6674 | |
| Gene Modifying | RNAIVT 338, | Exemplary Gene Modifying |
| System 2 | RNACS5630, | Polypeptide + TRAC tgRNA + |
| | RNACS7755 | B2M tgRNA |
| Mock | Water only | |

[1248] In this example, the template RNA of the heterologous gene modifying systems contained:
[1249] (1) a gRNA spacer;
[1250] (2) a gRNA scaffold;
[1251] (3) a heterologous object sequence; and
[1252] (4) a primer binding site (PBS) sequence.
   The exemplary template RNAs generated and used in the gene modifying systems and the corresponding dosages used in the experiments are given in Table E12.

TABLE E12
Template and single guide RNA: Names, sequences and doses

| Description | Name | Sequence | Dosage |
|---|---|---|---|
| TRAC4_P9R18_ | RNACS5630 | GAGAAUCAAAAUCGGUGAAUGUUUUAGAGCU | 1.5 μM |
| ins5-nick | | AGAAAUAGCAAGUUAAAAUAAGGCUAGUCCG | |
| | | UUAUCAACUUGAAAAAGUGGCACCGAGUCGGU | |
| | | GCCUGUCUGCCUAUUUAGUGCACCGAUUU | |
| | | (SEQ ID NO: 15006) | |
| B2m1_P1IR18_ | RNACS7755 | ACUCACGCUGGAUAGCCUCCGUUUUAGAGCUA | 1.5 μM |
| ins5_nick_ | | GAAAUAGCAAGUUAAAAUAAGGCUAGUCCGU | |
| v1 | | UAUCAACUUGAAAAAGUGGCACCGAGUCGGUG | |
| | | CUUUCUGGCCUGGAUGAUGGGCUAUCCAGC | |
| | | (SEQ ID NO: 15007) | |
| TRAC4_sgRNA | RNACS6527 | GAGAAUCAAAAUCGGUGAAUGUUUUAGAGCU | 1.5 μM |
| | | AGAAAUAGCAAGUUAAAAUAAGGCUAGUCCG | |
| | | UUAUCAACUUGAAAAAGUGGCACCGAGUCGGU | |
| | | GCUUUU (SEQ ID NO: 15456) | |
| B2M1_sgRNA | RNACS6674 | ACUCACGCUGGAUAGCCUCCGUUUUAGAGCUA | 1.5 μM |
| | | GAAAUAGCAAGUUAAAAUAAGGCUAGUCCGU | |
| | | UAUCAACUUGAAAAAGUGGCACCGAGUCGGUG | |
| | | CUUUU (SEQ ID NO: 15457) | |

[1253] In this example, the exemplary heterologous gene modifying polypeptide of the heterologous gene modifying system contained:
[1254] (1) an endonuclease and/or DNA binding domain;
[1255] (2) a peptide linker; and
[1256] (3) a reverse transcriptase (RT) domain,
   where (1), (2), and (3) are heterologous to each other. Accordingly, the heterologous gene modifying polypeptide in this Example was an example of a heterologous gene modifying polypeptide. A fusion polypeptide comprising a wildtype Cas9 domain, a linker, and an exemplary reverse transcriptase (RT) domain was used as a double strand break-inducing comparator to the exemplary heterologous gene modifying polypeptide.

[1257] The exemplary gene heterologous modifying polypeptide and fusion polypeptide of the gene modifying systems comprised the amino acid sequence indicated in Table E13.

TABLE E13
Exemplary Fusion and Gene Modifying Polypeptide
Information: Names, sequence and doses

| Polypeptide | | |
|---|---|---|
| Name/ | | |
| Description | Sequence | Dosage |
| RNAIVT1573/ | MPAAKRVKLDGGDKKYSIGLDIGTNSVGWAVIT | 2 μg |
| WT Cas9-RT | DEYKVPSKKFKVLGNTDRHSIKKNLIGALLFDSGE | |
| | TAEATRLKRTARRRYTRRKNRICYLQEIFSNEMA | |
| | KVDDSFFHRLEESFLVEEDKKHERHPIFGNIVDEV | |
| | AYHEKYPTIYHLRKKLVDSTDKADLRLIYLALAH | |
| | MIKFRGHFLIEGDLNPDNSDVDKLFIQLVQTYNQL | |
| | FEENPINASGVDAKAILSARLSKSRRLENLIAQLPG | |
| | EKKNGLFGNLIALSLGLTPNFKSNFDLAEDAKLQL | |
| | SKDTYDDDLDNLLAQIGDQYADLFLAAKNLSDAI | |
| | LLSDILRVNTEITKAPLSASMIKRYDEHHQDLTLL | |
| | KALVRQQLPEKYKEIFFDQSKNGYAGYIDGGASQ | |
| | EEFYKFIKPILEKMDGTEELLVKLNREDLLRKORT | |
| | FDNGSIPHQIHLGELHAILRRQEDFYPFLKDNREKI | |
| | EKILTFRIPYYVGPLARGNSRFAWMTRKSEETITP | |
| | WNFEEVVDKGASAQSFIERMTNFDKNLPNEKVLP | |
| | KHSLLYEYFTVYNELTKVKYVTEGMRKPAFLSGE | |
| | QKKAIVDLLFKTNRKVTVKQLKEDYFKKIECFDS | |
| | VEISGVEDRFNASLGTYHDLLKIIKDKDFLDNEEN | |
| | EDILEDIVLTLTLFEDREMIEERLKTYAHLFDDKV | |
| | MKQLKRRRYTGWGRLSRKLINGIRDKQSGKTILD | |
| | FLKSDGFANRNFMQLIHDDSLTFKEDIQKAQVSG | |
| | QGDSLHEHIANLAGSPAIKKGILQTVKVVDELVK | |
| | VMGRHKPENIVIEMARENQTTQKGQKNSRERMK | |
| | RIEEGIKELGSQILKEHPVENTQLQNEKLYLYYLQ | |
| | NGRDMYVDQELDINRLSDYDVDHIVPQSFLKDDS | |
| | IDNKVLTRSDKNRGKSDNVPSEEVVKKMKNYWR | |
| | QLLNAKLITQRKFDNLTKAERGGLSELDKAGFIKR | |
| | QLVETRQITKHVAQILDSRMNTKYDENDKLIREV | |
| | KVITLKSKLVSDFRKDFQFYKVREINNYHHAHDA | |
| | YLNAVVGTALIKKYPKLESEFVYGDYKVYDVRK | |
| | MIAKSEQEIGKATAKYFFYSNIMNFFKTEITLANG | |
| | EIRKRPLIETNGETGEIVWDKGRDFATVRKVLSMP | |
| | QVNIVKKTEVQTGGFSKESILPKRNSDKLIARKKD | |
| | WDPKKYGGFDSPTVAYSVLVVAKVEKGKSKKLK | |
| | SVKELLGITIMERSSFEKNPIDFLEAKGYKEVKKD | |
| | LIIKLPKYSLFELENGRKRMLASAGELQKGNELAL | |
| | PSKYVNFLYLASHYEKLKGSPEDNEQKQLFVEQH | |
| | KHYLDEIIEQISEFSKRVILADANLDKVLSAYNKH | |
| | RDKPIREQAENIIHLFTLTNLGAPAAFKYFDTTIDR | |
| | KRYTSTKEVLDATLIHQSITGLYETRIDLSQLGGD | |
| | GGAEAAAKEAAAKEAAAKEAAAKALEAEAAAK | |
| | EAAAKEAAAKEAAAKAGGTAPLEEEYRLFLEAPI | |
| | QNVTLLEQWKREIPKVWAEINPPGLASTQAPIHV | |
| | QLLSTALPVRVRQYPITLEAKRSLRETIRKFRAAGI | |
| | LRPVHSPWNTPLLPVRKSGTSEYRMVQDLREVNK | |
| | RVETIHPTVPNPYTLLSLLPPDRIWYSVLDLKDAFF | |
| | CIPLAPESQLIFAFEWADAEEGESGQLTWTRLPQG | |
| | FKNSPTLFNEALNRDLQGFRLDHPSVSLLQYVDD | |
| | LLIAADTQAACLSATRDLLMTLAELGYRVSGKKA | |
| | QLCQEEVTYLGFKIHKGSRSLSNSRTQAILQIPVPK | |
| | TKRQVREFLGKIGYCRLFIPGFAELAQPLYAATRP | |
| | GNDPLVWGEKEEEAFQSLKLALTQPPALALPSLD | |
| | KPFQLFVEETSGAAKGVLTQALGPWKRPVAYLSK | |
| | RLDPVAAGWPRCLRAIAAAALLTREASKLTFGQD | |
| | IEITSSHNLESLLRSPPDKWLTNARITQYQVLLLDP | |
| | PRVRFKQTAALNPATLLPETDDTLPIHHCLDTLDS | |
| | LTSTRPDLTDQPLAQAEATLFTDGSSYIRDGKRYA | |
| | GAAVVTLDSVIWAEPLPIGTSAQKAELIALTKALE | |
| | WSKDKSVNIYTDSRYAFATLHVHGMIYRERGWL | |
| | TAGGKAIKNAPEILALLTAVWLPKRVAVMHCKG | |
| | HQKDDAPTSTGNRRADEVAREVAIRPLSTQATISA | |
| | GKRTADGSEFEKRTADGSEFESPKKKAKVE (SEQ | |
| | ID NO: 15458) | |
| RNAIVT 338/ | MPAAKRVKLDGGDKKYSIGLDIGTNSVGWAVIT | 2 μg |
| Exemplary | DEYKVPSKKFKVLGNTDRHSIKKNLIGALLFDSGE | |
| gene | TAEATRLKRTARRRYTRRKNRICYLQEIFSNEMA | |
| modifying | KVDDSFFHRLEESFLVEEDKKHERHPIFGNIVDEV | |
| polypeptide | AYHEKYPTIYHLRKKLVDSTDKADLRLIYLALAH | |
| | MIKFRGHFLIEGDLNPDNSDVDKLFIQLVQTYNQL | |
| | FEENPINASGVDAKAILSARLSKSRRLENLIAQLPG | |
| | EKKNGLFGNLIALSLGLTPNFKSNFDLAEDAKLQL | |
| | SKDTYDDDLDNLLAQIGDQYADLFLAAKNLSDAI | |
| | LLSDILRVNTEITKAPLSASMIKRYDEHHQDLTLL | |
| | KALVRQQLPEKYKEIFFDQSKNGYAGYIDGGASQ | |
| | EEFYKFIKPILEKMDGTEELLVKLNREDLLRKQRT | |
| | FDNGSIPHQIHLGELHAILRRQEDFYPFLKDNREKI | |
| | EKILTFRIPYYVGPLARGNSRFAWMTRKSEETITP | |
| | WNFEEVVDKGASAQSFIERMTNFDKNLPNEKVLP | |
| | KHSLLYEYFTVYNELTKVKYVTEGMRKPAFLSGE | |
| | QKKAIVDLLFKTNRKVTVKQLKEDYFKKIECFDS | |
| | VEISGVEDRFNASLGTYHDLLKIIKDKDFLDNEEN | |
| | EDILEDIVLTLTLFEDREMIEERLKTYAHLFDDKV | |
| | MKQLKRRRYTGWGRLSRKLINGIRDKQSGKTILD | |
| | FLKSDGFANRNFMQLIHDDSLTFKEDIQKAQVSG | |
| | QGDSLHEHIANLAGSPAIKKGILQTVKVVDELVK | |
| | VMGRHKPENIVIEMARENQTTQKGQKNSRERMK | |
| | RIEEGIKELGSQILKEHPVENTQLQNEKLYLYYLQ | |
| | NGRDMYVDQELDINRLSDYDVDHIVPQSFLKDDS | |
| | IDNKVLTRSDKARGKSDNVPSEEVVKKMKNYWR | |
| | QLLNAKLITQRKFDNLTKAERGGLSELDKAGFIKR | |
| | QLVETRQITKHVAQILDSRMNTKYDENDKLIREV | |
| | KVITLKSKLVSDFRKDFQFYKVREINNYHHAHDA | |
| | YLNAVVGTALIKKYPKLESEFVYGDYKVYDVRK | |
| | MIAKSEQEIGKATAKYFFYSNIMNFFKTEITLANG | |
| | EIRKRPLIETNGETGEIVWDKGRDFATVRKVLSMP | |
| | QVNIVKKTEVQTGGFSKESILPKRNSDKLIARKKD | |
| | WDPKKYGGFDSPTVAYSVLVVAKVEKGKSKKLK | |
| | SVKELLGITIMERSSFEKNPIDFLEAKGYKEVKKD | |
| | LIIKLPKYSLFELENGRKRMLASAGELQKGNELAL | |
| | PSKYVNFLYLASHYEKLKGSPEDNEQKQLFVEQH | |
| | KHYLDEIIEQISEFSKRVILADANLDKVLSAYNKH | |
| | RDKPIREQAENIIHLFTLTNLGAPAAFKYFDTTIDR | |
| | KRYTSTKEVLDATLIHQSITGLYETRIDLSQLGGD | |
| | GGAEAAAKEAAAKEAAAKEAAAKALEAEAAAK | |
| | EAAAKEAAAKEAAAKAGGTAPLEEEYRLFLEAPI | |
| | QNVTLLEQWKREIPKVWAEINPPGLASTQAPIHV | |
| | QLLSTALPVRVRQYPITLEAKRSLRETIRKFRAAGI | |
| | LRPVHSPWNTPLLPVRKSGTSEYRMVQDLREVNK | |
| | RVETIHPTVPNPYTLLSLLPPDRIWYSVLDLKDAFF | |
| | CIPLAPESQLIFAFEWADAEEGESGQLTWTRLPQG | |
| | FKNSPTLFNEALNRDLQGFRLDHPSVSLLQYVDD | |
| | LLIAADTQAACLSATRDLLMTLAELGYRVSGKKA | |
| | QLCQEEVTYLGFKIHKGSRSLSNSRTQAILQIPVPK | |
| | TKRQVREFLGKIGYCRLFIPGFAELAQPLYAATRP | |
| | GNDPLVWGEKEEEAFQSLKLALTQPPALALPSLD | |
| | KPFQLFVEETSGAAKGVLTQALGPWKRPVAYLSK | |
| | RLDPVAAGWPRCLRAIAAAALLTREASKLTFGQD | |
| | IEITSSHNLESLLRSPPDKWLTNARITQYQVLLLDP | |
| | PRVRFKQTAALNPATLLPETDDTLPIHHCLDTLDS | |
| | LTSTRPDLTDQPLAQAEATLFTDGSSYIRDGKRYA | |
| | GAAVVTLDSVIWAEPLPIGTSAQKAELIALTKALE | |
| | WSKDKSVNIYTDSRYAFATLHVHGMIYRERGWL | |
| | TAGGKAIKNAPEILALLTAVWLPKRVAVMHCKG | |
| | HQKDDAPTSTGNRRADEVAREVAIRPLSTQATISA | |
| | GKRTADGSEFEKRTADGSEFESPKKKAKVE (SEQ | |
| | ID NO: 15459) | |

### T-Cell Culturing, Activation and Nucleofection:

[1258] Activated T cells were used for this experiment. Prior to nucleofection, T cells were cultured with TexMACS supplemented with 5% human AB Serum, IL2 at 20 IU/ml, IL7 at 10 ng/ml, IL15 at 5 ng/ml in each well at 37° C., 5% C02 for 2 days and stimulated using T Cell TransAct. For the nucleofection of the first heterologous gene modifying system, 2000 ng of the first heterologous gene modifying polypeptide encoding mRNA was combined with TRAC and B2M single-guide RNAs (each sgRNA at a final conc. 1.5 μM) in RNA format. For the nucleofection of the second heterologous gene modifying system, 2000 ng of the second heterologous gene modifying polypeptide encoding mRNA was combined with TRAC and B2M template guide RNAs (each tgRNA at a final conc. 1.5 μM) in RNA format.

[1259] The RNA mixture (comprising the first or the second heterologous gene modifying system) was added to 250,000 activated T cells/condition in a total of 20 μL of Lonza P3 buffer. The T cells were then nucleofected in 96-well nucleofection cassettes using the program called Human T cell, stimulated (Program code: EO 115). After nucleofection, the cells were incubated at room temperature for 10 minutes and then transferred to 96-well plates containing 180 μL of TexMACS supplemented with 5% human AB Serum, IL2 at 20 IU/ml, IL7 at 10 ng/ml in each well and cultured at 37° C., 5% C02 for either 3 days prior to genomic extraction, or, for 4 days prior to flow cytometry analysis.

### Flow Cytometry:

[1260] To determine whether editing of the TRAC and B2M loci by the first and second heterologous gene modifying systems was successful, CD3 and B2M levels were measured. Functional loss of TRAC is known to be associated with loss of surface expression of the CD3 complex. Similarly, functional loss of B2M is associated with the loss of surface expression of beta2-microglobulin and can be detected with B2M antibody staining. As shown in FIG. 22, editing at the TRAC and B2M loci by the first and second heterologous gene modifying systems was successful with similar editing efficiencies using gene modifying systems comprising either a WT Cas9-RT fusion polypeptide or an exemplary gene modifying polypeptide, and editing was not observed in mock treated cells.

Translocation Measurements Using Digital PCR (dPCR):

[1261] To examine translocations by dPCR, cells were collected on the third day post nucleofection. Genomic DNA was extracted using a DNAdvance kit from Beckman Coulter by lysing the cells overnight in the Lysis LBH buffer with Proteinase K, and 1M DTT. The lysed cells were extracted as per manufacturer instructions using the Biomek i5 liquid handler. Post extraction, the concentrations of extracted genomic DNA were measured using the Quant-it 1×dsDNA assay kit, High Sensitivity from Thermofisher.

[1262] Translocation events were quantitated using the QIAcuity Eight digital PCR system from Qiagen. The reaction mix was prepared with the QIAcuity Probe PCR Kit according to manufacturer instructions and loaded onto 96-well 8.5 k nanochamber plates. Reaction partitioning was performed by the instrument's default protocol. Thermocycling and imaging were performed as described below. CNV (translocation occurrence) was calculated as such: [target amplicon]/[reference gene amplicon]*ploidy. Ploidy was assumed to be 2.

| Temperature | Time | | Cycles |
|---|---|---|---|
| 95° C. hot start | 2 | min | 1 |
| 94° C. denature | 30 | sec | < |
| 58° C. anneal/ext | 1 | min | 40X> |

| | | F primer | R primer |
|---|---|---|---|
| Assay | Probe (400 nM) | (800 nM) | (800 nM) |
| Balanced | /56- | GAACTCTCTTA | CCTTTCTTGCA |
| 1 | FAM/TGGTCTTAG/ZEN/GAACTTTG | AGACTACCTTT | GTTGAGTTGTG |
| | CTGCCACA/3IABKFQ/ | CTCC (SEQ ID | (SEQ ID NO: |
| | (SEQ ID NO: 15460) | NO: 15461) | 15462) |
| Balanced | /56- | GAATCTGAAC | ATCTTAAGCTG |
| 2 | FAM/ACGACCCAT/ZEN/ACACCCA | TCTCTTCAACC | CTGGGTATTGT |
| | AAGGATTGAG/3IABKFQ/ | TTTG (SEQ ID | (SEQ ID NO: |
| | (SEQ ID NO: 15463) | NO: 15464) | 15465) |
| Dicentric | /56- | GAGGTGTCCG | AGAATCTGAAC |
| | FAM/TGGTCTTAG/ZEN/GAACTTTG | TGTTCCTAAA | TCTCTTCAACC |
| | CTGCCACA/3IABKFQ/ | (SEQ ID NO: | T (SEQ ID NO: |
| | (SEQ ID NO: 15460) | 15466) | 15467) |
| Acentric | /56- | CCTTTCTTGCA | GACCTCAATCC |
| | FAM/ACTGTAAAC/ZEN/CTACACA | GTTGAGTTGT | TTTGGGTGTAT |
| | GGTGAGTTGGC/3IABKFQ/ | G (SEQ ID NO: | (SEQ ID NO: |
| | (SEQ ID NO: 15468) | 15462) | 15469) |
| RPP30 | /5HEX/TCCCTAGGT/ZEN/GGCCTG | TCCAGGAGGG | ATGGTCCGTCT |
| | AGCAG/3IABKFQ/ | AGAATTGATG | CAGGAAA (SEQ |
| | (SEQ ID NO: 15470) or /56- | (SEQ ID NO: | ID NO: 15473) |
| | ROXN/AGAGAACTGAGTGGAGTCA | 15472) | |
| | AGGCTGA/3IAbRQSp/ | | |
| | (SEQ ID NO: 15471) | | |

| | | Exposure | |
|---|---|---|---|
| Dye | Color | time (ms) | Gain |
| FAM | Green | 600 | 6 |
| HEX | Yellow | 500 | 6 |
| ROX | Red | 300 | 4 |

[1263] Total translocation % was calculated as a sum of all the 4 different translocation measurements (Balanced 1, Balanced 2, Acentric and Dicentric). FIG. 23 shows a graph of translocation % for cells transfected with gene modifying systems comprising WT Cas9-RT fusion polypeptide or an exemplary gene modifying polypeptide, or cells given a mock treatment. The results show that multiplexed editing with WTCas9-RT fusion polypeptide resulted in close to 8.53% translocation (FIG. 23) while editing with the exemplary heterologous gene modifying system showed background levels of translocation.

[1264] Overall, these results demonstrate that multiplexed knock-out of TRAC and B2M using an exemplary heterologous gene modifying peptide does not produce translocations in T cells, whereas a WT-Cas9-RT fusion polypeptide, which induces double strand using similarly targeted sgRNAs does produce translocations.

### Example 12: Retrotransposon-Based Gene Modifying Systems Drive the Integration and Expression of a Template in Primary Cells when Delivered as All-RNA Compositions

[1265] This example demonstrates that editing of a genome using a gene modifying system described herein drives the integration and expression of a template in primary cells when delivered as all-RNA compositions.

[1266] The gene modifying systems used in this Example comprise a nucleic acid encoding an RTE-1_MD, Vingi-1_Acar, CR1-1_PH, RTE-3_BF, or RTE-25_LMi driver as described herein.

[1267] Briefly, the template RNA encoding GFP for use with the RTE-1_MD, Vingi-1_Acar, CR1-1_PH, RTE-3_BF, and RTE-25_LMi gene modifying systems comprises the following sequences from 5′ to 3′. 5′UTR, GFP, EF1alpha, 3′UTR and was co-delivered with the driver RNA. Sequences are given in Table E14. Template RNA alone was also used as a negative control.

[1268] The gene modifying systems and any control constructs were introduced as RNAs into activated T cells, primary human bronchial epithelial (hBE) cells, or iPSC using Neon transfection system or Amaxa 4D-Nucleofector system.

[1269] Integration and expression was assessed by measuring GFP levels at 3 days post-transfection.

[1270] As shown in FIG. 24, RTE-1_MD, Vingi-1_Acar, CR1-1_PH, RTE-3_BF, and RTE-25_LMi gene modifying systems drive integration and expression of a template in T cells, hBE cells, iPSCs when delivered as all-RNA compositions. Successful integration of the transgene into all three cell types using several gene modifying systems is shown in FIG. 24. The use of certain drivers resulted in higher levels of expression and integration in particular cell types. For example, use of the RTE-1_MD driver resulted in the highest GFP expression levels in T and hBE cells, while use of Vingi-1_Acar and RTE-3 BF drivers resulted in the highest GFP expression levels in iPSCs

TABLE E14
Nucleic Acid and Amino Acid Sequences of Gene Modifying Polypeptides

| | | SEQ | | SEQ |
|---|---|---|---|---|
| Name | Nucleic Acid Sequence | ID NO | Amino Acid Sequence | ID NO |
| RTE- | AGGAAAUAAGAGAGAAAAGAAGAGUAAGAAGAAAUAUAAGAGCCACCAUGCCA | 15,012 | MPKKKRKVGGSDSTAHPNQGRGLEKVSQTL | 15,013 |
| 1_MD | AAGAAGAAAAGAAAAGUAGGAGGUUCCGACUCCACAGCUCAUCCCAACCAGGG | | PALQTPGQHTAAGGSSPLSGRNQRKNTKKLL | |
| RNAIVT | ACGUGGCCUGGAGAAGGUGUCCCAGACUCUGCCUGCGCUGCAGACCCCAGGGC | | LGAWNIRTLLDRENTPRPERRTALIGKELARY | |
| 1901 | AGCACACUGCCGCUGGGGGAUCCUCUCCCCUGUCCGGCAGGAAUCAGCGGAAG | | NIDIAALSETRLPEEGSLSEPTTGYTFFWKGRA | |
| | AACACCAAAAAGCUGUUGCUGGGCGCCUGGAACAUCCGCACCCUGCUCGACCGC | | SNEDRIHGVGLAIKTSLLKQLPDLPVGISERL | |
| | GAAAAUACUCCCCGUCCUGAAAGACGCACGGCACUGAUUGGGAAAGAGCUCGC | | MKIRLPLSKDRYATIISAYAPTLTSTEETIEQF | |
| | CAGAUAUAACAUCGACAUCGCUGCCCUGUCCGAAACCCGCCUGCCAGAGGAAG | | YSDLSAVLHSVPTNDKLILLGDFNARVGQDH | |
| | GAUCUCUGAGCGAGCCUACCACUGGCUACACGUUCUUUUGGAAGGGCAGAGCA | | ERWKGVLGKHGVGKMNNNGLLLLSKCSEFE | |
| | AGCAACGAGGACCGUAUCCAUGGUGUAGGCCUGGCUAUCAAGACCUCUCUCCU | | LTITNTVFRMANKYKTTWMHPRSKQWHLID | |
| | GAAACAACUCCCAGAUCUGCCAGUCGGCAUCUCAGAGAGACUGAUGAAGAUCA | | YIIVRRRDIQDVKITRAMRGAECWTDHRLVR | |
| | GGCUUCCUCUCUCAAAAGACCGCUACGCAACCAUCAUUUCCGCAUACGCGCCGA | | ATLQMRIAPRHPKRAQTVRAFYNVSRLRDPS | |
| | CCCUGACUAGCACCGAGGAAACCAUUGAGCAGUUCUACUCUGAUCUUUCAGCU | | YLQTFQSCLDDKLSAKGPLTGSSTEKWNQFR | |
| | GUUUUGCACUCCGUGCCUACCAACGACAAGCUGAUCCUCCUGGGCGACUUCAAC | | DAVKETSKAVLGPKQRNHQDWFDENNTAIE | |
| | GCUCGCGUGGGUCAGGACCAUGAGCGCUGGAAAGGCGUGCUGGGUAAGCAUGG | | DLLSKKNKAFMEWQNNPNSAPKKDRFKSLQ | |
| | CGUGGGUAAGAUGAACAAUAACGGCCUCCUGCUCCUGUCUAAGUGUAGCGAAU | | ATAQREIRKMQDRWWEKKAEEIQRFADMKN | |
| | UCGAGCUGACUAUUACCAACACUGUUUUUCGUAUGGCUAACAAGUACAAAACU | | YKQFFSALKTVYGPLKPTTTPLLSSDGDTLIK | |
| | ACAUGGAUGCACCCCAGGAGCAAGCAGUGGCACCUGAUUGACUACAUUAUCGU | | DKKGISNRWKEHFSQLLNRPSSVDQSALDQIP | |
| | GCGUAGGCGGGAUAUCCAGGACGUGAAGAUUACCCGUGCAAUGCGCGGCGCUG | | QNRTIEQLDVPPSIEEVQKAIKQMSAGKAPGK | |
| | AGUGCUGGACAGACCAUCGCCUGGUGAGAGCUACUCUCCAGAUGAGGAUCGCA | | DGIPTEVYKALNGKALQAFHIVLTSIWEEED | |
| | CCGCGUCACCCUAAGCGCGCCCAGACCGUGCGGGCCUUUUACAACGUAUCACGG | | MPPELRDASIVALYKNKGSRAACDNYRGISL | |
| | CUUCGGGAUCCUUCCUACCUUCAGACAUUUCAAUCUUGCCUCGAUGACAAGCU | | LSTAGKILARVILNRLLSSVSEQNLPESQCGFR | |
| | CUCUGCUAAGGGUCCCCUCACCGGAUCUUCAACAGAGAAGUGGAACCAAUUCC | | PDRSTIDMVFTVRQMQEKCLEQNLSLYIVFID | |
| | GCGAUGCGGUGAAGGAAACCAGCAAAGCAGUCCUGGGACCGAAGCAGCGCAAC | | LTKAFDTVNRDALWVILSKLGCPAKFVKLIQ | |
| | CACCAAGACUGGUUUGACGAAAAUAACACUGCCAUCGAAGACCUCCUGUCUAA | | LFHVDMTGEVLSGGETSDRFNISNGVKQGCV | |
| | AAAGAACAAAGCAUUUAUGGAGUGGCAGAAUAACCCAAACAGUGCACCCAAGA | | LAPVLFNLFFTQVLRHAVMDLDLGVYIKYRL | |
| | AAGACCGUUUCAAAAGCCUGCAGGCCACCGCGCAGCGCGAGAUCCGGAAGAUG | | DGSLFDLRRLTAKTKTTERLILEALFADDCAL | |
| | CAGGACCGCUGGUGGGAAAAAAAGGCCGAAGAGAUCCAGAGGUUCGCGGAUAU | | MAHQENHLQTIVDRFSTATKLFGLTISLSKTE | |
| | GAAAAACUACAAGCAGUUCUUUAGCGCACUGAAGACCGUGUACGGACCUCUCA | | VLFQPAPGRPTNQPCITIDGTQLSNVNTFKYL | |
| | AACCCACCACGACUCCCCUGCUCUCUUCCGAUGGUGACACUCUCAUCAAGGACA | | GSTIANDGSLDHEINARIQKASQALGRLRCKV | |
| | AAAAGGGAAUCAGCAACCGCUGGAAAGAACACUUUUCUCAACUUCUCAACCGC | | LQIIRGVSTATKLKVYNAVVLSSLLYGCETW | |
| | CCAAGCUCCGUGGACCAGAGCGCUCUGGACCAGAUCCCGCAGAACCGUACCAUC | | TLYRKHMKQLEQFHQRSLRSIMRIRWQDRIT | |
| | GAGCAGCUGGACGUGCCUCCCUCCAUCGAAGAGGUCCAGAAGGCUAUCAAGCA | | NQEVLDRANSTSIEVMVLKTQLRWSGHVIRM | |
| | GAUGUCUGCUGGGAAGGCUCCUGGCAAGGAUGGGAUCCCAACAGAGGUCUAUA | | DPQRIPRQVFYGELSAGLRKQGRPKKRFKDQ | |
| | AAGCUCUCAACGGAAAGGCGCUGCAGGCCUUUCACAUUGUCCUGACCUCCAUC | | LKSNLKWAGITPKQLELAASDRSSWRTHINH | |
| | UGGGAGGAAGAGGACAUGCCACCUGAACUUAGGGACGCCUCUAUUGUGGCCCU | | AATTFEDERRRRLAAARERRHQATTAPPVTT | |
| | GUACAAGAAUAAGGGCAGCCGCGCAGCUUGUGAUAACUAUCGUGGCAUCUCAC | | GVPCPMCHKLCASAFGLQSHMRVHRRSGSET | |
| | UCCUGAGUACAGCUGGCAAGAUUCUGGCUCGUGUGAUCCUGAACCGGUUGCUG | | PGTSESATPESVSGWRLFKKIS | |
| | AGUUCCGUUUCCGAGCAGAACCUGCCCGAAUCACAGUGCGGCUUCCGCCCCGAU | | | |
| | CGGUCCACCAUCGAUAUGGUGUUCACCGUGCGUCAGAUGCAGGAGAAGUGCCU | | | |
| | GGAACAGAAUCUGAGCCUGUACAUCGUUUUCAUCGAUCUGACUAAGGCCUUCG | | | |
| | ACACGGUGAACCGCGAUGCCCUGUGGGUGAUCCUGAGCAAGCUGGGGUGCCCC | | | |
| | GCUAAGUUCGUAAAGCUCAUCCAGUUGUUCCACGUUGAUAUGACGGGAGAGGU | | | |
| | CCUGUCCGGUGGAGAAACCUCCGACCGGUUUAACAUCUCCAAUGGCGUGAAAC | | | |
| | AGGGCUGCGUCCUGGCCCCAGUGCUGUUCAACCUGUUUUUCACACAGGUGCUG | | | |
| | AGACAUGCGGUUAUGGAUCUUGACCUGGGUGUGUAUAUCAAGUAUCGCUUGGA | | | |
| | CGGCAGUCUGUUCGAUCUCAGACGCCUGACAGCUAAGACUAAGACUACCGAGC | | | |
| | GCCUCAUUCUCGAAGCCCUGUUUGCCGACGAUUGUGCCCUUAUGGCCCACCAGG | | | |
| | AGAACCACCUGCAGACGAUUGUCGACCGCUUCUCUACAGCGACCAAGCUGUUC | | | |
| | GGCCUCACCAUCUCCCUCUCAAAGACCGAAGUCCUGUUUCAGCCCGCACCCGGG | | | |
| | AGACCCACGAAUCAGCCGUGCAUUACCAUUGACGGGACCCAACUUUCCAACGUC | | | |
| | AACACCUUCAAGUAUCUGGGAUCUACCAUCGCCAAUGAUGGCAGCCUGGAUCA | | | |
| | UGAAAUCAACGCAAGGAUCCAAAAGGCUAGCCAGGCACUGGGCCGCCUCCGGU | | | |
| | GCAAGGUCCUGCAGCACCGGGGCGUUUCCACUGCCACUAAACUGAAGGUGUAC | | | |
| | AACGCUGUCGUGCUCUCUUCCCUGCUUUAUGGCUGCGAAACAUGGACUCUGUA | | | |
| | CCGGAAGCAUAUGAAACAGCUUGAGCAGUUCCACCAGAGGAGCUUGCGUAGCA | | | |
| | UCAUGAGGAUCCGCUGGCAGGACCGCAUCACCAACCAGGAGGUGCUGGACAGG | | | |
| | GCUAAUUCCACCAGCAUCGAAGUUAUGGUGCUGAAGACCCAGCUCCGUUGGUC | | | |
| | UGGCCAUGUCAUUCGGAUGGACCCUCAGCGUAUCCCCCGCCAGGUAUUCUACG | | | |
| | GGGAACUGUCUGCGGGGCUCAGAAAGCAGGGCCGCCCAAAGAAACGCUUUAAG | | | |
| | GAUCAGCUGAAAAGCAAUCUGAAGUGGGCCGGCAUCACCCCCAAGCAGCUGGA | | | |
| | GCUGGCGGCAUCUGACCGCUCCAGCUGGCGCACCCACAUUAACCACGCAGCUAC | | | |
| | UACCUUUGAGGACGAACGCCGGCGCAGACUGGCCGCUGCACGCGAGAGGCGCC | | | |
| | ACCAAGCCACUACCGCCCCUCCCGUGACCACUGGGGUCCCUUGCCCUAUGUGCC | | | |
| | ACAAGCUGUGUGCGUCUGCCUUCGGUUUGCAGUCCCACAUGCGUGUGCAUCGC | | | |
| | CGCAGCGGCAGCGAGACUCCCGGGACCUCAGAGUCCGCCACACCCGAAAGUGUG | | | |
| | AGCGGCUGGCGGCUGUUCAAGAAGAUUAGCUGAGCUGGAGCCUCGGUGGCCAU | | | |
| | GCUUCUUGCCCCUUGGGCCUCCCCCCAGCCCCUCCUCCCCUUCCUGCACCCGUA | | | |
| | CCCCCGUGGUCUUUGAAUAAAGUCUGAAAAAAAAAAAAAAAAAAAAAAAAAAA | | | |
| | AAAAAAAAAAAAAAAAAAAAAAAAAAAAAAAAAAAAAAAAAAAAAAAAAAAA | | | |
| | AA | | | |
| Vingi- | AGGAAAUAAGAGAGAAAAGAAGAGUAAGAAGAAAUAUAAGAGCCACCAUGGAC | 15,014 | MDEYQRSLSRPLLTIMSINIEGLSLAKEELLAK | 15,002 |
| 1_Acar | GAGUACCAGCGCUCCUUGUCCCGCCCCCUGUUGACAAUCAUGAGUAUUAAUAU | | MSEDISCDILCIQETHRDITMRRPKILGMQLA | |
| RNAIVT | CGAAGGCUUGAGCCUCGCGAAAGAGGAACUGCUUGCCAAGAUGUCCGAGGACA | | VERPHRQYGSAIFVRSGVAISATSLTEVNNIEI | |
| 696 | UCAGCUGCGACAUUCUGUGCAUCCAAGAGACCCAUCGCGACAUCACCAUGCGUC | | LSVELDSCTVSSLYKPPGADFYFTPPTSCIINII | |
| | GCCCCAAGAUCCUCGGUAUGCAGCUUGCGGUGGAGCGCCCUCACCGCCAGUACG | | EAHFVVGDFNSHSCVWGYDEDDRNGEAVLT | |
| | GCUCCGCGAUUUUCGUGCGUUCCGGUGUGGCCAUUUCUGCUACCAGCCUCACCG | | WADNSRMSLLHDSKLPPSFNSGRWKRGYNP | |
| | AGGUUAACAAUAUUGAGAUCCUGUCAGUGGAGCUCGAUUCCUGUACCGUCUCC | | DLIFVKESISHQCTKRVLNPIPNTQHRPICCVA | |
| | AGUCUGUACAAACCUCCCGGUGCAGACUUCUACUUUACUCCCCCGACGUCUUGC | | YAAVRPKSVPFRRRYNFNKANWTKFTETLEA | |
| | CACAACCAUGAGGCUCAUUUUGUGGUUGGUGAUUUCAAUUCCCACUCCUGCGU | | AISDIEPSIENYDLFVEAVKRSSRLSIPRGCRTS | |
| | GUGGGGCUAUGACGAGGAUGACCGCAACGGCGAAGCUGUUCUGACCUGGGCCG | | YLPGLNEESLNQLQEYLRLFQENPYSDGTIAA | |
| | AUAAUUCCCGCAUGUCCCUGCUCCACGAUAGUAAGCUGCCUCCCUCCUUCAACA | | GQKLSTALANAKKDRWIELLENLDMSKSSRK | |
| | GUGGGAGAUGGAAGCGCGGGUACAACCCUGAUCUUAUCUUCGUCAAAGAAUCC | | AWQLLRRLDSDPLVNPGHANVTPDQIAHQLI | |
| | AUCUCUCAUCAGUGUACCAAGCGCGUCCUCAACCCGAUUCCUAACACUCAGCAC | | QNGKTNCSRIKMKINRVPELETHQLSSPLNLK | |
| | CGCCCCAUUUGUUGCGUAGCAUAUGCUGCCGUGCGUCCCAAGUCUGUCCCCUUC | | ELREAIKRCKTGKAPGLDDLMMEQIKHLGAK | |
| | AGAAGGAGAUACAACUUCAACAAGGCUAACUGGACCAAGUUUACCGAAACCUU | | AENWLLKFYNQCLAHKQIPRAWRKTKIIAIL | |
| | GGAAGCGGCAAUCUCCGACAUUGAGCCAUCUAUCGAGAAUUAUGAUCUCUUCG | | KPGKDASNARNYRPISLLCHLYKVYERMLLN | |
| | UUGAGGCAGUCAAGCGGUCCUCUCGCCUGAGUAUCCCCCGUGGAUGUAGGACC | | RLGPVIEPKLIAQQAGFRPGKNCTGQILHLTE | |
| | UCCUACCUGCCCGGCCUGAACGAAGAGUCACUCAAUCAGCUGCAGGAAUACCU | | HIEEGYEKGCITGTVFVDLTAAYDTVQHRKM | |
| | GCGCCUGUUCCAAGAGAAUCCUUACUCCGAUGGCACCAUCGCUGCCGGACAAA | | LHKVYHITRDFDFTKTVQTLLENRSFYVEFQG | |
| | AACUGAGCACCGCUCUGGCGAAUGCUAAGAAAGACCGCUGGAUCGAGCUGCUC | | QKSRWRRQKNGLPQGSVLAPTLFNIFTNDQP | |
| | GAGAACCUGGACAUGUCCAAGUCUAGCCGGAAAGCUUGGCAGCUCCUGCGCCG | | QPPLTKSFIYADDLGLTTQAKDFETVEKQLTN | |
| | GCUGGACAGCGACCCCCUCGUGAAUCCUGGCCAUGCCAAUGUAACGCCGGACCA | | ALKDLSSYYKENHLKPNPAKTQVCAFHLRNR | |
| | GAUCGCCCAUCAACUGAUCCAGAACGGCAAGACCAAUUGCAGUAGAAUCAAGA | | EANRKLKVTWEGQELEHCFHPKYLGVTLDR | |
| | UGAAGAUCAACAGAGUACCCGAGUUGGAAACACACCAGCUGUCUAGUCCUCUC | | TLTYRKHCMNTKHKVAARNNILRKLTGSAW | |
| | AACCUCAAAGAGCUCCGCGAAGCAAUCAAAAGGUGUAAGACGGGCAAAGCUCC | | GADPQVIRTSALALSFSTAEYACPVWHKSAH | |
| | CGGUCUGGAUGACCUGAUGAUGGAACAGAUCAAACACUUGGGGGCCAAGGCUG | | AKQVDIALNETCRIITGCLKPTPVDKLYKLAG | |
| | AGAACUGGUUGCUGAAAUUCUACAACCAGUGCCUGGCUCACAAGCAGAUCCCC | | IAPPDVRREVAANGERKKVEHCESHPLHGYH | |
| | CGUGCGUGGCGCAAGACUAAGAUUAUCGCCAUCUUGAAGCCGGGCAAGGAUGC | | PPPTRLKSRKGFMRTTTPLDVPPAAARVSLW | |
| | UAGUAACGCCCGCAACUACCGUCCUAUUUCCCUCCUGUGUCACCUUUACAAGGU | | AAKPGNSNWMAPQEGLPPGANQEWATWKS | |
| | GUACGAGCGCAUGCUCCUGAACCGCUUGGGCCCCGUCAUCGAGCCUAAACUGA | | LNRLRSGVGRSKDNLARWHYLEESSTLCDCG | |
| | UCGCCCAACAGGCUGGUUUCCGCCCAGGUAAGAACUGCACUGGACAGAUCCUG | | AEQTTQHMYACPQCPASCTEEELFKATDNAV | |
| | CACCUUACGGAGCACAUCGAGGAAGGUUACGAGAAGGGCUGCAUCACCGGAAC | | AVARFWSKTIGGGSPKKKRKVSGSETPGTSES | |
| | CGUCUUCGUGGACCUGACUGCGGCCUACGACACGGUUCAGCACAGAAAAAUGC | | ATPESVSGWRLFKKIS | |
| | UCCACAAGGUAUAUCAUAUUACCCGGGAUUUCGACUUCACCAAAACAGUGCAG | | | |
| | ACGCUUCUGGAGAAUCGCUCCUUUUACGUCGAGUUCCAGGGUCAGAAAAGUCG | | | |
| | GUGGAGGCGCCAGAAGAACGGCUUGCCCCAGGGUAGCGUGCUCGCCCCAACCCU | | | |
| | GUUUAAUAUCUUCACCAACGACCAGCCACAGCCCCCGCUGACAAAAUCCUUUAU | | | |
| | CUAUGCCGACGAUCUUGGCCUGACCACGCAAGCCAAGGACUUUGAGACAGUCG | | | |
| | AGAAACAGCUCACAAACGCACUCAAGGACCUGAGUUCCUAUUACAAGGAGAAC | | | |
| | CAUCUCAAACCUAACCCCGCUAAGACACAGGUCUGCGCUUUUCACCUGAGGAA | | | |
| | UCGGGAGGCCAACCGUAAACUGAAGGUGACAUGGGAGGGACAGGAACUGGAGC | | | |
| | ACUGUUUCCACCCCAAGUAUUUGGGCGUGACUCUCGAUCGCACCCUUACGUAU | | | |
| | CGGAAGCACUGCAUGAACACUAAGCAUAAGGUGGCGGCCAGAAAUAACAUCCU | | | |
| | GCGUAAACUCACAGGAAGCGCCUGGGGCGCCGACCCACAGGUCAUCCGUACCAG | | | |
| | UGCUCUGGCCCUGUCUUUCUCCACUGCUGAAUAUGCGUGUCCGGUGUGGCACA | | | |
| | AGUCCGCCCACGCGAAGCAGGUGGAUAUUGCCCUGAACGAGACAUGCCGGAUU | | | |
| | AUCACUGGUUGCCUCAAGCCUACCCCCGUCGACAAGCUCUAUAAGUUGGCCGGC | | | |
| | AUUGCACCCCCUGAUGUCCGUCGCGAAGUCGCAGCCAAUGGCGAGCGGAAAAA | | | |
| | GGUAGAACACUGCGAAUCACAUCCGCUGCAUGGAUAUCAUCCCCCUCCCACCCG | | | |
| | GCUUAAGAGCCGUAAGGGCUUCAUGCGCACAACCACUCCGCUGGAUGUGCCUC | | | |
| | CCGCUGCCGCGCGCGUGAGUCUGUGGGCCGCUAAGCCCGGUAAUUCCAAUUGG | | | |
| | AUGGCACCGCAAGAGGGCCUCCCGCCCGGAGCCAAUCAAGAGUGGGCCACAUG | | | |
| | GAAGUCCUUGAACAGGCUGCGCUCCGGUGUGGGACGCUCUAAGGACAACCUGG | | | |
| | CCCGUUGGCACUAUCUGGAAGAGUCAUCCACCCUGUGCGACUGUGGUGCUGAA | | | |
| | AGACUCCCGGGACCUCAGAGUCCGCCACACCCGAAAGUGUGAGCGGCUGGCGGC | | | |
| | UGUUCAAGAAGAUUAGCUGAUUAAUUAAGCUGGAGCCUCGGUGGCCAUGCUUC | | | |
| | UUGCCCCUUGGGCCUCCCCCCAGCCCCUCCUCCCCUUCCUGCACCCGUACCCCCG | | | |
| | UGGUCUUUGAAUAAAGUCUGAUCUAGAAAAAAAAAAAAAAAAAAAAAAAAAA | | | |
| | AAAAAAAAAAAAAAAAAAAAAAAAAAAAAAAAAAAAAAAAAAAAAAAAAAAA | | | |
| | AA | | | |
| CR1- | AGGAAAUAAGAGAGAAAAGAAGAGUAAGAAGAAAUAUAAGAGCCACCAUGCUG | 15,015 | MLYTIFLVYGILCFFFVYFCIYLYITVYLCFLFF | 15517 |
| 1_PH | UAUACCAUCUUCCUCGUUUAUGGGAUCCUGUGUUUUUUCUUUGUGUAUUUCUG | | LFLLLCGDVESNPGPGRARGCRLLYCNIRGLH | |
| RNAIVT | CAUCUACCUGUACAUCACUGUUUAUCUUUGUUUUCUGUUCUUUCUGUUUCUGC | | ANLAELDFVSRGVDVVCCSETLVAGRRHDA | |
| 636 | UUCUGUGCGGUGACGUGGAAAGCAAUCCUGGACCAGGCAGAGCCCGUGGAUGU | | ELALAGFQSPFRRLCGSGPGFRGMAVYVRSG | |
| | CGGUUGCUGUAUUGCAACAUCCGCGGUCUGCAUGCUAAUCUGGCCGAGCUGGA | | FCAYRQSVHECACHEIIVVRVCGRLNNYYLF | |
| | CUUUGUUAGUCGCGGGGUGGACGUGGUCUGCUGUUCCGAGACUCUGGUGGCUG | | SLYRSPATDDSLYDCLLTAMASIQSTDPKAAF | |
| | GGCGUCGCCACGAUGCCGAGUUGGCCCUCGCUGGCUUCCAGUCCCCCUUUCGUA | | VFVGDVNAHHRDWLGSASPTDCHGVAALDF | |
| | GGCUCUGUGGCUCAGGCCCUGGCUUCCGUGGCAUGGCGGUGUACGUCAGGUCU | | CTLSSCVQLVRGSTHIAGNCLDLVMTDVPDL | |
| | GGGUUCUGUGCCUACCGGCAGAGUGUGCACGAAUGUGCCUGCCACGAGAUUAU | | MTVTVGSPIGSSDHSHLVVSLDLNQVVPVVD | |
| | CGUCGUUCGCGUGUGUGGACGUCUGAACAAUUACUAUCUGUUCUCUCUCUACC | | TRRVVFVKSRANWVAITRAVRTLPWRQIIHS | |
| | GCUCCCCGGCCACCGAUGACUCCCUUUACGAUUGCCUUCUGACUGCCAUGGCCA | | EDPVSELNDLTVSILERFVPKRTILVRSRDKP | |
| | GCAUCCAGUCCACUGAUCCGAAGGCAGCCUUCGUCUUCGUUGGCGACGUAAAC | | WFDDQCRLAFEAKQAAYRAWRRSRDRTLW | |
| | GCACAUCACCGGGACUGGCUGGGAAGCGCCUCUCCAACAGAUUGUCACGGCGU | | QTYVDRRAEAKRVYEEAQRRLRQRSRESLLS | |
| | CGCCGCUCUGGACUUUUGCACCCUUUCCAGCUGCGUGCAACUCGUCCGUGGGUC | | IDHPHRWWSELKGSVFGAEPSLPPLVGPGGGI | |
| | CACUCAUAUCGCUGGAAACUGUCUGGAUCUGGUGAUGACCGACGUGCCUGACC | | ITDPLARAELLSAHFDGKQSRDVIALPHGCHP | |
| | UGAUGACCGUGACCGUCGGAUCCCCGAUUGGAAGUAGCGACCACUCCCACCUG | | EPRLTSLAFRSGAIKVLLEGLDPYGGVDPVG | |
| | GUGGUCUCACUGGAUCUCAACCAGGUCGUGCCUGUUGUGGAUACACGCAGGGU | | MFPLFYKQLADVLAPKLAVIFRRLIRLGNFPR | |
| | UGUGUUCGUGAAAAGCCGCGCCAACUGGGUCGCCAUCACUCGCGCUGUGAGGA | | CWRTGNITPIPKGPVSPYVANYRPITLTPILSK | |
| | CUCUGCCUUGGCGGCAGAUUAUCCACUCCGAGGACCCUGUAAGUGAGCUCAAU | | VFEKLIAGKLGRFAEVTGLLPAGQFAYRIGLG | |
| | GACCUGACCGUGUCUAUUCUGGAACGCUUUGUUCCCAAGCGCACCAUCCUCGU | | CCDALLSVSHHLQSALDCRSEARLVQLDFSA | |
| | GAGAAGCCGCGAUAAGCCUUGGUUCGAUGACCAGUGUAGACUGGCUUUCGAGG | | AFDRVNHRGLLYKLESFGVGGRVLSIIRDFVS | |
| | CUAAGCAGGCGGCUUACCGUGCUUGGCGUAGGAGUCGGGACCGCACGUUGUGG | | ERTQSVSVDGVLSASVGVVSGVPQGSVLGPL | |
| | CAGACCUAUGUGGACAGGCGGGCCGAGGCCAAGCGCGUGUAUGAAGAGGCUCA | | LFVLYTSDMFSSLENTLINYADDSTLMAVIPA | |
| | GAGGCGCCUUCGCCAGAGGAGCCGUGAAAGCCUGCUCAGUAUUGACCACCCUC | | PRLRDAVAQSLNRDLSRISAWCSAWSMKLN | |
| | AUCGCUGGUGGUCAGAGCUCAAGGGCUCCGUGUUCGGCGCCGAACCCAGCCUG | | ASKTKSMIISRSRTLVPQHPQLEIDDTLLQESS | |
| | CCCCCUCUCGUUGGUCCUGGCGGUGGAAUCAUUACCGAUCCCCUCGCCAGGGCC | | SLEILGVVFDEKLTFEPHIRRLVSRASTKIGLL | |
| | GAGCUGCUCUCCGCACAUUUUGAUGGAAAGCAGUCACGCGAUGUCAUCGCCUU | | RKVNSVFGDSQVARRCFYAFLLPVLEYCSPV | |
| | GCCCCACGGUUGCCACCCGGAGCCCCGCCUCACAUCUCUGGCCUUCAGGUCCGG | | WASAADTHLRLLDRLVSSASRLCADNDLVN | |
| | CGCUAUCAAGGUCCUCCUGGAAGGACUCGACCCCUACGGUGGCGUUGACCCCGU | | LSIIRRRVAELCMFYKVYNNERIIWLYSSLPA | |
| | CGGCAUGUUUCCUCUGUUUUACAAGCAGCUGGCGGACGUCCUGGCCCCAAAGU | | LKVFGRETRAACGAHSFTLEAVRCRTNQFCR | |
| | UGGCCGUUAUCUUUCGUCGGCUGAUCCGCCUCGGCAACUUUCCCCGCUGCUGGC | | CFVPWSAKVWNLLPASAFGRIGLQAFKSAVN | |
| | GCACUGGUAAUAUCACUCCCAUCCCCAAGGGCCCCGUGAGUCCUUACGUGGCCA | | GFLLDFLGGGSPKKKRKVSGSETPGTSESATP | |
| | AUUACCGUCCCAUCACCUUGACACCUAUCCUGUCUAAGGUUUUCGAAAAGCUG | | ESVSGWRLFKKIS | |
| | AUCGCAGGCAAGCUGGGUCGCUUUGCUGAAGUCACUGGCUUGCUCCCUGCUGG | | | |
| | UCAGUUUGCUUAUCGCAUCGGUCUGGGCUGCUGUGACGCUCUCCUGUCCGUGA | | | |
| | GCCAUCACCUGCAGUCCGCCCUGGACUGCCGCUCCGAAGCCCGCCUGGUGCAGC | | | |
| | UCGAUUUCUCCGCAGCGUUUGACCGCGUUAAUCACAGGGGUCUUCUGUAUAAA | | | |
| | UUGGAGUCCUUCGGCGUCGGGGGCCGGGUGCUGUCAACUAUCCGUGAUUUCGU | | | |
| | AUCCGAGCGCACCCAGUCUGUAUCCGUGGACGGUGUUCUGUCCGCCAGCGUCG | | | |
| | GCGUGGUUAGCGGAGUCCCCCAGGGUAGCGUGCUGGGACCUCUGCUCUUUGUA | | | |
| | UUGUAUACGUCCGACAUGUUCUCUAGCCUGGAGAAUACCCUCAUUAACUAUGC | | | |
| | AGAUGACUCCACUUUGAUGGCAGUUAUUCCGGCCCCACGCCUGCGUGACGCCG | | | |
| | UAGCGCAGUCCCUGAAUAGGGACCUGUCACGCAUCAGUGCCUGGUGUUCAGCU | | | |
| | UGGUCCAUGAAGCUGAACGCGUCCAAGACCAAAAGCAUGAUUAUCUCAAGGUC | | | |
| | CAGGACUUUGGUGCCUCAACACCCCCAGCUGGAGAUCGACGAUACUUUGCUGC | | | |
| | AGGAGUCCUCAUCCCUGGAAAUCCUGGGCGUCGUGUUCGAUGAGAAGCUCACC | | | |
| | UUCGAGCCUCACAUCAGGCGGCUGGUGAGCCGCGCGUCUACCAAGAUCGGGCU | | | |
| | GCUCCGCAAGGUGAACUCCGUGUUCGGCGAUUCCCAGGUCGCGAGGCGUUGCU | | | |
| | UUUACGCUUUCCUGCUCCCUGUGCUGGAGUACUGCUCUCCGGUAUGGGCGAGU | | | |
| | GCCGCGGAUACCCAUCUUCGUCUUCUGGACCGCCUUGUCUCCAGCGCCAGCCGU | | | |
| | UUGUGUGCUGACAACGAUCUGGUGAACCUGAGUCACCGUCGGCGCGUGGCUGA | | | |
| | GCUGUGUAUGUUCUACAAGGUGUACAAUAACGAGAGGCAUUGGCUGUACUCAU | | | |
| | CCCUGCCAGCCCUGAAGGUCUUCGGGCGCGAAACGCGUGCCGCGUGCGGUGCUC | | | |
| | ACUCUUUUACGUUGGAGGCGGUUCGCUGUCGCACCAACCAGUUCUGCCGCUGC | | | |
| | UUUGUGCCUUGGUCUGCGAAGGUGUGGAACCUGCUCCCUGCCUCCGCUUUCGG | | | |
| | GAGAAUCGGUCUGCAGGCAUUUAAAAGCGCUGUGAACGGUUUCCUGUUGGACU | | | |
| | UUCUGGGCGGCGGCUCCCCCAAGAAGAAGCGGAAGGUGAGCGGCAGCGAGACU | | | |
| | CCCGGGACCUCAGAGUCCGCCACACCCGAAAGUGUGAGCGGCUGGCGGCUGUUC | | | |
| | AAGAAGAUUAGCUGAUUAAUUAAGCUGCCUUCUGCGGGGCUUGCCUUCUGGCC | | | |
| | AUGCCCUUCUUCUCUCCCUUGCACCUGUACCUCUUGGUCUUUGAAUAAAGCCU | | | |
| | GAGUAGGAAGUCUAGAAAAAAAAAAAAAAAAAAAAAAAAAAAAAAAAAAAAA | | | |
| | AAAAAAAAAAAAAAAAAAAAAAAAAAAAAAAAAAAAAAAAAAA | | | |
| RTE- | AGGAAAUAAGAGAGAAAAGAAGAGUAAGAAGAAAUAUAAGAGCCACCAUGCCA | 15,016 | MPKKKRKVGGSSGTPRVAFDSGKDLRNPIGQ | 15,017 |
| 3_BF | AAGAAGAAAAGAAAAGUAGGAGGUUCCAGCGGCACACCAAGAGUGGCAUUUGA | | SPPALSRAAPGQLGTDPSRSACFIGCLELRVLL | |
| RNAIVT | CAGCGGAAAGGACCUCAGAAAUCCCAUAGGGCAGUCCCCACCUGCCCUCAGCCG | | DKWIVCRAPDKQESKEKRRQKTQPIRIGSWN | |
| 1770 | GGCUGCCCCCGGACAGUUGGGGACAGACCCCUCACGUUCCGCAUGUUUUAUAG | | VRTMRTGLSDDLTVIEDIRKTAAIDRELYRLN | |
| | GGUGCCUGGAGCUUCGAGUCCUGUUGGACAAAUGGAUCGUGUGCCGAGCUCCU | | IDIVALQETRLPDSGSLKEDSYTFFWQGKGME | |
| | GAUAAGCAGGAAUCCAAGGAGAAACGCCGCCAGAAAACUCAGCCUAUACGGAU | | ETREHGVGFAVRNTLLHMIEPPTGGTERIITLR | |
| | UGGAAGCUGGAACGUCAGAACAAUGCGGACAGGCCUGUCUGAUGACUUGACAG | | LSTHEGPVNLLCVYAPTLQATSEVKDQFYGQ | |
| | UUAUCGAGGACAUCCGUAAAACAGCCGCAAUUGACCGCGAACUUUAUCGCCUG | | LDSAIKKIPVSEHIFILGDFNARVGTDQESWQT | |
| | AAUAUUGACAUUGUUGCGCUGCAAGAAACGCGUUUGCCCGACAGCGGUUCUCU | | VLGHHGIGKMNENGQRLLELCCYHNLCVTN | |
| | CAAGGAAGACAGCUAUACUUUCUUCUGGCAGGGUAAGGGUAUGGAGGAAACAA | | TFFQNKAIHKASWRHPRSQRWHQLDLVITRR | |
| | GGGAGCACGGCGUGGGGUUUGCCGUGAGAAACACUUUGCUCCACAUGAUUGAG | | TSLNSVCNTRAYIISADCDTDIISLIAARIKLRP | |
| | CCUCCCACGGGUGGUACCGAGCGCAUCAUUACACUUCGUUUAAGUACCCAUGA | | KKLHHMKKKGQPKIDVSKTMLPDRNQKFLE | |
| | GGGCCCUGUGAAUCUCCUCUGUGUUUACGCUCCCACCCUGCAGGCGACAUCAGA | | CLEGTLNNIQPQDAEHRWETLSKTIYSAAAQS | |
| | GGUCAAAGAUCAAUUUUACGGGCAGUUAGACUCCGCUAUCAAGAAGAUACCCG | | YGKKERKNTDWFEAYISELEPVMDTKRKAL | |
| | UCAGCGAGCACAUUUUUAUCUUGGGAGACUUUAACGCCCGGGUCGGGACGGAC | | VSYKQNPSSQNLQALKAARQEAQRASRRCA | |
| | CAGGAGUCAUGGCAGACCGUGCUCGGACAUCACGGGAUUGGGAAAAUGAACGA | | NNYWLLLSERIQLASATGDIRRMYEGIKQAT | |
| | AAACGGGCAGCGGCUGCUCGAACUAUGUUGCUAUCACAACCUGUGCGUCACCA | | GKPIKKSAPLKAKSGEIITDKDKQMARWVEH | |
| | AUACCUUCUUCCAGAAUAAAGCCAUUCAUAAAGCUAGUUGGAGACAUCCCAGA | | YLDIYSTENSVSQDALDNIEDFSVLAELDADP | |
| | AGUCAACGAUGGCACCAGCUAGACUUGGUAAUCACCAGGCGGACAAGCCUCAA | | TIEELSKAIDSMSNGKAPGEDNIPAELIKSGKS | |
| | UUCCGUUUGCAAUACCAGGGCCUAUCAUUCCGCGGACUGUGAUACUGAUCACA | | VLLEPLHELLRLCWKEGKVPQSMRNSKIVTL | |
| | GCCUGAUCGCUGCGAGAAUCAAGCUGAGGCCUAAGAAACUGCACCAUAUGAAG | | YKNKGDRTDCNSYRGISLLSIVGKVFAKVVL | |
| | AAGAAAGGCCAGCCAAAGAUCGAUGUGUCUAAAACUAUGCUCCCCGACAGGAA | | TRLQVLADRVYPESQCGFRAERSTTDMIFSVR | |
| | CCAGAAGUUCCUUGAAUGCCUGGAAGGCACACUCAACAACAUCCAACCGCAGG | | QLQEKCREQQRPLYIAFIDLTKAFDLVSRRGL | |
| | AUGCAGAGCACAGGUGGGAGACCCUGUCCAAGACCAUCUACAGCGCCGCCGCAC | | FQLLRKIGCPPQLLDIIISFHEDMKGVVSEDGE | |
| | AGUCCUAUGGCAAGAAGGAGCGGAAGAACACAGACUGGUUCGAGGCUUAUAUC | | TSEPFAIRSGVKQGCVLAPTLFGIFFSLLLKSA | |
| | UCUGAGCUUGAGCCUGUGAUGGAUACGAAGAGGAAAGCCCUGGUGAGUUAUAA | | FGHSTQGVHLHTRSDGKLFNLARLRAKTKVR | |
| | GCAGAAUCCCAGCUCACAAAAUCUGCAGGCCCUGAAGGCUGCCCGCCAGGAAGC | | SVLIRDMLFADDAALVAHVEDELQQLLNQFA | |
| | UCAGAGAGCCUCACGACGAUGCGCCAACAACUACUGGUUGCUACUGUCUGAGA | | HACSEFALTISIKKTVVMGQDVPQPPVVTIGS | |
| | GAAUUCAACUAGCGUCCGCGACCGGCGAUAUUCGCCGCAUGUAUGAGGGCAUC | | EVLEVTDHFTYLGSTVTSNLSLDKEIDRRIAR | |
| | AAGCAAGCCACCGGUAAACCUAUCAAAAAAUCUGCCCCCCUUAAGGCUAAAUC | | AAGVMTKLGTRVWNNSHLTLNTKLEVYRSC | |
| | CGGCGAGAUUAUAACCGAUAAGGACAAGCAAAUGGCUCGCUGGGUCGAACACU | | VLSTLLYGSETWTTYAKQENRLESFHLRCLR | |
| | ACCUGGAUAUUUAUUCUACAGAGAACUCUGUCUCUCAGGAUGCCCUGGAUAAC | | RILGISWRDRVPNTTVLERSCSLSIHLLLCQRR | |
| | AUCGAGGAUUUUUCUGUGCUGGCCGAACUCGAUGCUGAUCCAACCAUAGAAGA | | LRWLGHVSRMKDGRIPKDILFGELATGKRPV | |
| | GUUAUCUAAGGCUAUAGACUCAAUGUCAAACGGCAAAGCACCAGGCGAAGACA | | GRPALRFRDVCKRDLKLTDIDPASWEQIAAD | |
| | AUAUUCCAGCCGAAAUUAUAAAAAGUGGUAAAUCUGUGCUCCUUGAACCGCUG | | RNRWRHTVKDGLAKGQERRTEHLESRRRKR | |
| | CAUGAAUUACUGAGACUGUGUUGGAAAGAGGGGAAAGUCCCGCAGUCAAUGCG | | KEKPQQGNPSAFICPNCGRDCHARIGLQSHSR | |
| | AAACUCGAAAAUCGUAACUCUGUACAAGAAUAAAGGAGAUAGGACUGACUGCA | | RCQPPSGSETPGTSESATPESVSGWRLFKKIS | |
| | AUUCCUACCGCGGCAUAAGCUUGUUGUCUAUCGUGGGCAAAGUAUUCGCUAAA | | | |
| | GUGGUGCUAACCAGGCUGCAGGUGCUGGCUGAUCGCGUGUACCCAGAGAGCCA | | | |
| | GUGUGGCUUCCGAGCCGAGAGGAGUACCACUGACAUGAUCUUUUCAGUGCGGC | | | |
| | AGCUUCAGGAGAAGUGCCGCGAGCAACAACGGCCUCUGUACAUCGCCUUUAUU | | | |
| | GACUUGACUAAGGCAUUCGACUUAGUGAGUAGGAGGGGACUUUUCCAGCUCCU | | | |
| | GAGGAAGAUUGGUUGUCCUCCACAACUGCUGGAUAUAAUUAUCUCGUUCCAUG | | | |
| | AGGAUAUGAAGGGAGUCGUUAGUUUCGAUGGGGAAACAAGCGAACCAUUCGCA | | | |
| | AUUAGGUCUGGCGUCAAGCAAGGCUGCGUUCUGGCACCUACGUUGUUUGGCAU | | | |
| | CUUUUUCUCCCUCCUCCUGAAGUCCGCAUUUGGGCACAGCACUCAGGGUGUGC | | | |
| | ACCUGCAUACCCGGUCUGAUGGGAAGCUUUUUAACCUCGCCCGCCUCAGGGCCA | | | |
| | AGACUAAGGUACGCUCUGUAUUAAUCAGAGAUAUGCUGUUCGCAGACGACGCA | | | |
| | GCGCUCGUUGCUCAUGUUGAGGACGAGCUUCAACAGUUAUUGAAUCAGUUCGC | | | |
| | ACAUGCAUGCUCAGAAUUCGCCCUCACAAUUAGUAUCAAAAAAACUGUCGUGA | | | |
| | UGGGUCAGGAUGUGCCACAGCCCCCAGUGGUGACGAUCGGAAGUGAGGUCCUG | | | |
| | GAGGUUACCGACCACUUUACGUACCUUGGAAGCACUGUGACCUCCAACCUGUC | | | |
| | CCUAGACAAAGAAAUCGACAGGCGCAUUGCCCGGGCAGCCGGAGUCAUGACAA | | | |
| | AACUGGGAACCCGAGUGUGGAAUAAUAGUCACCUCACGCUGAAUACUAAGCUU | | | |
| | GAAGUGUAUAGAUCGUGUGUUCUGAGCACACUGCUUUACGGGUCCGAAACCUG | | | |
| | GACCACCUACGCUAAGCAGGAGAAUAGACUGGAGAGCUUUCACCUUAGGUGUC | | | |
| | UUCGUCGAAUCCUAGGCAUUUCCUGGAGAGAUCGGGUUCCCAACACAACCGUG | | | |
| | UUGGAGAGAAGCUGCUCACUGAGUAUUCACCUCUUACUGUGCCAGCGGCGGCU | | | |
| | GCGGUGGCUGGGCCACGUAAGCAGGAUGAAGGACGGACGUAUCCCGAAAGAUA | | | |
| | UUCUCUUCGGGGAACUGGCUACUGGAAAGCGUCCCGUCGGCCGCCCAGCUCUCC | | | |
| | GCUUCAGGGACGUAUGUAAAAGAGAUUUGAAACUAACUGAUAUCGAUCCGGCC | | | |
| | UCCUGGGAACAGAUCGCAGCCGACCGAAACCGUUGGCGCCACACUGUGAAGGA | | | |
| | CGGACUGGCAAAAGGGCAAGAAAGACGGACAGAGCACUUAGAAUCACGGCGGC | | | |
| | GAAAGAGAAAGGAGAAGCCUCAGCAGGGUAACCCAAGUGCCUUUAUCUGUCCU | | | |
| | AAUUGCGGCAGGGACUGCCAUGCGCGGAUAGGACUGCAAUCGCAUUCAAGAAG | | | |
| | AUGUCAGCCCCCUAGCGGCAGCGAGACUCCCGGGACCUCAGAGUCCGCCACACC | | | |
| | CGAAAGUGUGAGCGGCUGGCGGCUGUUCAAGAAGAUUAGCUGAGCUGGAGCCU | | | |
| | CGGUGGCCAUGCUUCUUGCCCCUUGGGCCUCCCCCCAGCCCCUCCUCCCCUUCC | | | |
| | UGCACCCGUACCCCCGUGGUCUUUGAAUAAAGUCUGAAAAAAAAAAAAAAAAA | | | |
| | AAAAAAAAAAAAAAAAAAAAAAAAAAAAAAAAAAAAAAAAAAAAAAAAAAAA | | | |
| | AAAAAAAAAAAA | | | |
| RTE- | AGGAAAUAAGAGAGAAAAGAAGAGUAAGAAGAAAUAUAAGAGCCACCAUGCCC | 15,018 | MPRKNWNCGRRTGDEKRKMMFGCWNVQGI | 15519 |
| 25_LMi | CGCAAAAAUUGGAACUGCGGGCGACGAACCGGGGAUGAAAAACGUAAGAUGAU | | STKIDLLPAELDMFNIDVVVLSETKRKGKGEE | |
| RNAIVT | GUUUGGAUGCUGGAAUGUGCAGGGAAUCUCGACAAAGAUAGAUCUGCUGCCAG | | ELDNYVHIWSGVSKAVRAKAGVSIMIQKKW | |
| 1772 | CAGAACUGGACAUGUUCAACAUUGAUGUCGUGGUGCUCUCCGAGACAAAGAGG | | KKRITNWTFINERIITVEMTLFAREVVIIGVYA | |
| | AAGGGCAAGGGUGAAGAGGAGUUGGAUAAUUACGUUCACAUCUGGUCAGGGGU | | PTNDTKDKEKDAFWDTLRETIEKIPRRKELII | |
| | CUCUAAGGCUGUCAGAGCCAAGGCUGGUGUCUCCAUCAUGAUACAGAAAAAGU | | MGDMNGRVGIRESCKIVGKHGEAEYNDNGE | |
| | GGAAGAAACGUAUCACUAACUGGACGUUCAUAAAUGAGCGCAUCAUAACCGUU | | RLIDICAQFDLKITNTFFKHKDIHKYTWQQNT | |
| | GAAAUGACACUGUUUGCGCGGGAAGUUGUUAUCAUCGGCGUAUACGCCCCCAC | | KELRSIIDYIIIRQTSSFKAADVRSYRGAQCGS | |
| | CAACGACACUAAGGAUAAAGAGAAAGACGCGUUUUGGGACACUCUCAGAGAAA | | DHYLVKMKSFWPWKNATNDTSNINKMNCSE | |
| | CCAUCGAAAAAAUCCCCAGAAGGAAGGAACUUAUCAUAAUGGGUGAUAUGAAU | | KVQNVHFNIDSLQDESIRTFFKARMERTLDES | |
| | GGCCGGGUGGGGAUUAGAGAAUCCUGCAAGAUAGUGGGCAAGCAUGGAGAAGC | | FEGSTEEIYEYIKTKVKNVASEVLGIKENNPK | |
| | AGAGUAUAACGACAAUGGAGAGCGUCUUAUUGAUAUUUGCGCCCAGUUCGACU | | RAAEWWSEEIETSVKEKRNAFVQWLNDKSE | |
| | UGAAGAUCACUAACACGUUUUUCAAGCACAAGGACAUCCACAAGUAUACAUGG | | GTRSKYKEKKNEVEKKIRLAKNEAWERTCA | |
| | CAGCAAAACACGAAAGAGCUGAGAUCGAUCAUCGAUUAUAUUAUUAUAAGGCA | | NVNSKLGFGRAKEAWSVLKALRQDTKGKSN | |
| | GACCUCUAGCUUCAAAGCUGCUGACGUCAGAUCAUACCGUGGAGCUCAGUGCG | | LQLVTQKEWEEYFKKLLNEDRDEYLEEGTVE | |
| | GUAGCGACCACUAUCUCGUAAAAAUGAAAAGCUUUUGGCCGUGGAAAAACGCC | | ENEHHDDEILISESEVLQVLRTGKNGKSPGPG | |
| | ACCAAUGAUACAAGCAACAUCAAUAAGAUGAACUGUUCCGAGAAGGUGCAAAA | | NINMEFLKYGGDKIVKLILQLFNKMLHGDSV | |
| | CGUGCAUUUCAAUAUCGAUUCCCUGCAGGACGAGAGCAUUCGGACAUUUUUCA | | PKEMKLGYISTIFKKGDRKICSNYRGICVTNT | |
| | AGGCCCGUAUGGAGAGGACCUUGGACGAGAGUUUCGAGGGGUCCACAGAAGAG | | LMRIFGKIIKNKLEKNFRTQQEQCGFTAGRSC | |
| | AUCUACGAGUAUAUAAAGACAAAAGUCAAAAACGUUGCCUCUGAGGUGCUGGG | | VDHIFTLRQILEKHREKSKNVGLIFIDLEKAYD | |
| | CAUCAAGGAAAAUAAUCCUAAGCGAGCCGCAGAGUGGUGGUCUGAAGAGAUUG | | TVPRKLLWRALHRANINTSLIKIIEQMYKDNI | |
| | AGACAUCUGUGAAAGAGAAGCGCAAUGCAUUCGUGCAGUGGCUGAACGAUAAG | | CQVKIGNTLSQKFRTSKGLLQGCPMSPTLFKI | |
| | UCAGAGGGUACUCGAAGUAAGUACAAGGAAAAAAAGAAUGAAGUGGAAAAAA | | YIDICLRTWSQKCNSMGLEIRDGVYLHHLLF | |
| | AGAUCAGACUAGCUAAAAAUGAAGCAUGGGAACGGACCUGUGCCAAUGUGAAC | | ADDQVVIAQDGEDANYMCNQLAIAYKNWG | |
| | AGCAAGCUGGGAUUCGGACGCGCCAAGGAAGCGUGGUCUGUCCUCAAAGCUUU | | LKINYQKTEYLTNDPHELRIEGKKIKKVNTFC | |
| | ACGCCAGGACACCAAGGGUAAAAGUAACCUGCAACUUGUUACUCAGAAGGAGU | | YLGSILETEGKSDSEINKRISSGRKVIGMLNSV | |
| | GGGAAGAGUAUUUUAAGAAACUUCUGAAUGAAGAUCGCGACGAGUACCUCGAG | | LWSRNVMNRTKKIIYKSIFESAVLYGAETWTI | |
| | GAGGGCACAGUGGAAGAGAAUGAACAUCACGAUGAUGAGAUUCUGAUUAGCGA | | NQKIITKKLQALEMDFWRRSARISRKEKRRN | |
| | AAGCGAAGUACUCCAGGUCCUGAGGACGGGGAAAAACGGCAAGUCCCCUGGAC | | TEVIKRMEIIERIDEVMDRKKLRWYGHVRRM | |
| | CUGGGAAUAUUAACAUGGAGUUUCUCAAAUACGGAGGGGACAAGAUCGUAAAG | | EDTRIPKLVLEWQPEGRRRRGRPVTTWIKNV | |
| | CUCAUUCUUCAGCUGUUCAACAAGAUGCUACAUGGCGACUCUGUGCCAAAAGA | | QLTMNRLGAEEEDTQDRHTWRNIVNNGGGS | |
| | GAUGAAGUUGGGGUAUAUCUCCACAAUUUUUAAGAAAGGCGACCGAAAGAUUU | | PKKKRKVSGSETPGTSESATPESVSGWRLFKK | |
| | GUUCAAAUUACAGGGGUAUUUGUGUAACUAACACCCUAAUGCGGAUCUUCGGA | | IS | |
| | AAAAUUAUCAAGAAUAAACUGGAAAAGAACUUUCGGACGCAACAGGAACAGUG | | | |
| | CGGUUUUACAGCGGGGCGCUCUUGCGUGGAUCACAUCUUCACCCUGAGACAGA | | | |
| | UAUUGGAGAAGCACAGAGAAAAAAGUAAAAACGUGGGACUUAUUUUCAUAGAC | | | |
| | UUAGAGAAAGCAUACGACACUGUGCCCCGGAAAUUGUUAUGGCGGGCCCUACA | | | |
| | CAGGGCAAAUAUCAACACAUCACUGAUUAAAAUUAUCGAGCAGAUGUACAAAG | | | |
| | ACAACAUUUGUCAGGUGAAGAUCGGCAACACCCUGAGCCAGAAAUUUCGAACU | | | |
| | AGUAAGGGGCUGUUGCAGGGAUGCCCUAUGUCCCCAACUCUCUUUAAGAUCUA | | | |
| | UAUCGAUAUUUGUCUGCGGACCUGGUCACAAAAAUGUAAUUCCAUGGGUCUUG | | | |
| | AGAUCCGGGAUGGCGUAUAUCUCCAUCAUUUACUAUUCGCCGAUGAUCAAGUG | | | |
| | GUUAUCGCCCAGGACGGCGAGGACGCCAAUUACAUGUGUAACCAAUUAGCCAU | | | |
| | AGCUUACAAAAACUGGGGCCUGAAGAUCAAUUACCAAAAAACUGAGUAUCUGA | | | |
| | CGAACGACCCGCACGAACUGAGAAUCGAGGGGAAGAAGAUUAAAAAGGUGAAC | | | |
| | ACCUUCUGCUACUUGGGCAGUAUCCUUGAAACCGAAGGGAAGUCAGACAGUGA | | | |
| | GAUUAAUAAAAGGAUUAGCUCCGGCCGUAAGGUCAUCGGCAUGCUGAAUUCAG | | | |
| | UUCUGUGGAGCCGGAACGUCAUGAAUAGAACAAAGAAAAUUAUUUAUAAGUCU | | | |
| | AUAUUCGAGAGCGCUGUCCUCUAUGGCGCUGAGACUUGGACAAUCAACCAGAA | | | |
| | ACAUACCAAAAAGCUGCAGGCACUCGAGAUGGACUUUUGGCGACGCAGUGCAC | | | |
| | GCAUCUCUCGGAAGGAAAAAAGACGGAACACCGAAGUGAUUAAAAGGAUGGAG | | | |
| | AUCAUAGAGAGAAUUGAUGAGGUCAUGGACAGGAAGAAGCUUAGGUGGUACGG | | | |
| | ACACGUCAGGAGGAUGGAGGAUACCAGGAUCCCCAAGUUGGUGCUGGAGUGGC | | | |
| | AGCCUGAGGGACGCCGCCGAAGAGGGCGCCCAGUGACUACAUGGAUAAAAAAC | | | |
| | GUUCAACUGACCAUGAACAGACUCGGCGCCGAAGAAGAGGACACCCAGGAUAG | | | |
| | GCAUACUUGGCGGAAUAUUGUGAAUAAUGGCGGCGGCUCCCCCAAGAAGAAGC | | | |
| | GGAAGGUGAGCGGCAGCGAGACUCCCGGGACCUCAGAGUCCGCCACACCCGAA | | | |
| | AGUGUGAGCGGCUGGCGGCUGUUCAAGAAGAUUAGCUGAGCUGGAGCCUCGGU | | | |
| | GGCCAUGCUUCUUGCCCCUUGGGCCUCCCCCCAGCCCCUCCUCCCCUUCCUGCA | | | |
| | CCCGUACCCCCGUGGUCUUUGAAUAAAGUCUGAAAAAAAAAAAAAAAAAAAAA | | | |
| | AAAAAAAAAAAAAAAAAAAAAAAAAAAAAAAAAAAAAAAAAAAAAAAAAAAA | | | |
| | AAAAAAAA | | | |
| RTE- | AGGAAAUAAGAGAGAAAAGAAGAGUAAGAAGAAAUAUAAGAGCCACCAUGGAC | 15,019 | MDSTAHPNQGRGLEKVSQTLPALQTPGQHTA | 15,003 |
| 1_MD | UCCACAGCUCAUCCCAACCAGGGACGUGGCCUGGAGAAGGUGUCCCAGACUCU | | AGGSSPLSGRNQRKNTKKLLLGAWNIRTLLD | |
| RNAIVT | GCCUGCGCUGCAGACCCCAGGGCAGCACACUGCCGCUGGGGGAUCCUCUCCCCU | | RENTPRPERRTALIGKELARYNIDIAALSETRL | |
| 1123 | GUCCGGCAGGAAUCAGCGGAAGAACACCAAAAAGCUGUUGCUGGGCGCCUGGA | | PEEGSLSEPTTGYTFFWKGRASNEDRIHGVGL | |
| | ACAUCCGCACCCUGCUCGACCGCGAAAAUACUCCCCGUCCUGAAAGACGCACGG | | AIKTSLLKQLPDLPVGISERLMKIRLPLSKDRY | |
| | CACUGAUUGGGAAAGAGCUCGCCAGAUAUAACAUCGACAUCGCUGCCCUGUCC | | ATIISAYAPTLTSTEETIEQFYSDLSAVLHSVPT | |
| | GAAACCCGCCUGCCAGAGGAAGGAUCUCUGAGCGAGCCUACCACUGGCUACAC | | NDKLILLGDFNARVGQDHERWKGVLGKHGV | |
| | GUUCUUUUGGAAGGGCAGAGCAAGCAACGAGGACCGUAUCCAUGGUGUAGGCC | | GKMNNNGLLLLSKCSEFELTITNTVFRMANK | |
| | UGGCUAUCAAGACCUCUCUCCUGAAACAACUCCCAGAUCUGCCAGUCGGCAUCU | | YKTTWMHPRSKQWHLIDYIIVRRRDIQDVKIT | |
| | CAGAGAGACUGAUGAAGAUCAGGCUUCCUCUCUCAAAAGACCGCUACGCAACC | | RAMRGAECWTDIIRLVRATLQMRIAPRIIPKR | |
| | AUCAUUUCCGCAUACGCGCCGACCCUGACUAGCACCGAGGAAACCAUUGAGCA | | AQTVRAFYNVSRLRDPSYLQTFQSCLDDKLS | |
| | GUUCUACUCUGAUCUUUCAGCUGUUUUGCACUCCGUGCCUACCAACGACAAGC | | AKGPLTGSSTEKWNQFRDAVKETSKAVLGPK | |
| | UGAUCCUCCUGGGCGACUUCAACGCUCGCGUGGGUCAGGACCAUGAGCGCUGG | | QRNHQDWFDENNTAIEDLLSKKNKAFMEWQ | |
| | AAAGGCGUGCUGGGUAAGCAUGGCGUGGGUAAGAUGAACAAUAACGGCCUCCU | | NNPNSAPKKDRFKSLQATAQREIRKMQDRW | |
| | GCUCCUGUCUAAGUGUAGCGAAUUCGAGCUGACUAUUACCAACACUGUUUUUC | | WEKKAEEIQRFADMKNYKQFFSALKTVYGP | |
| | GUAUGGCUAACAAGUACAAAACUACAUGGAUGCACCCCAGGAGCAAGCAGUGG | | LKPTTTPLLSSDGDTLIKDKKGISNRWKEHFS | |
| | CACCUGAUUGACUACAUUAUCGUGCGUAGGCGGGAUAUCCAGGACGUGAAGAU | | QLLNRPSSVDQSALDQIPQNRTIEQLDVPPSIE | |
| | UACCCGUGCAAUGCGCGGCGCUGAGUGCUGGACAGACCAUCGCCUGGUGAGAG | | EVQKAIKQMSAGKAPGKDGIPTEVYKALNG | |
| | CUACUCUCCAGAUGAGGAUCGCACCGCGUCACCCUAAGCGCGCCCAGACCGUGC | | KALQAFHIVLTSIWEEEDMPPELRDASIVALY | |
| | GGGCCUUUUACAACGUAUCACGGCUUCGGGAUCCUUCCUACCUUCAGACAUUU | | KNKGSRAACDNYRGISLLSTAGKILARVILNR | |
| | CAAUCUUGCCUCGAUGACAAGCUCUCUGCUAAGGGUCCCCUCACCGGAUCUUCA | | LLSSVSEQNLPESQCGFRPDRSTIDMVFTVRQ | |
| | ACAGAGAAGUGGAACCAAUUCCGCGAUGCGGUGAAGGAAACCAGCAAAGCAGU | | MQEKCLEQNLSLYIVFIDLTKAFDTVNRDAL | |
| | CCUGGGACCGAAGCAGCGCAACCACCAAGACUGGUUUGACGAAAAUAACACUG | | WVILSKLGCPAKFVKLIQLFHVDMTGEVLSG | |
| | CCAUCGAAGACCUCCUGUCUAAAAAGAACAAAGCAUUUAUGGAGUGGCAGAAU | | GETSDRFNISNGVKQGCVLAPVLFNLFFTQVL | |
| | AACCCAAACAGUGCACCCAAGAAAGACCGUUUCAAAAGCCUGCAGGCCACCGCG | | RHAVMDLDLGVYIKYRLDGSLFDLRRLTAKT | |
| | CAGCGCGAGAUCCGGAAGAUGCAGGACCGCUGGUGGGAAAAAAAGGCCGAAGA | | KTTERLILEALFADDCALMAHQENHLQTIVD | |
| | GAUCCAGAGGUUCGCGGAUAUGAAAAACUACAAGCAGUUCUUUAGCGCACUGA | | RFSTATKLFGLTISLSKTEVLFQPAPGRPTNQP | |
| | AGACCGUGUACGGACCUCUCAAACCCACCACGACUCCCCUGCUCUCUUCCGAUG | | CITIDGTQLSNVNTFKYLGSTIANDGSLDHEIN | |
| | GUGACACUCUCAUCAAGGACAAAAAGGGAAUCAGCAACCGCUGGAAAGAACAC | | ARIQKASQALGRLRCKVLQHRGVSTATKLKV | |
| | UUUUCUCAACUUCUCAACCGCCCAAGCUCCGUGGACCAGAGCGCUCUGGACCAG | | YNAVVLSSLLYGCETWTLYRKHMKQLEQFH | |
| | AUCCCGCAGAACCGUACCAUCGAGCAGCUGGACGUGCCUCCCUCCAUCGAAGAG | | QRSLRSIMRIRWQDRITNQEVLDRANSTSIEV | |
| | GUCCAGAAGGCUAUCAAGCAGAUGUCUGCUGGGAAGGCUCCUGGCAAGGAUGG | | MVLKTQLRWSGHVIRMDPQRIPRQVFYGELS | |
| | GAUCCCAACAGAGGUCUAUAAAGCUCUCAACGGAAAGGCGCUGCAGGCCUUUC | | AGLRKQGRPKKRFKDQLKSNLKWAGITPKQ | |
| | ACAUUGUCCUGACCUCCAUCUGGGAGGAAGAGGACAUGCCACCUGAACUUAGG | | LELAASDRSSWRTHINHAATTFEDERRRRLA | |
| | GACGCCUCUAUUGUGGCCCUGUACAAGAAUAAGGGCAGCCGCGCAGCUUGUGA | | AARERRHQATTAPPVTTGVPCPMCHKLCASA | |
| | UAACUAUCGUGGCAUCUCACUCCUGAGUACAGCUGGCAAGAUUCUGGCUCGUG | | FGLQSHMRVHRRSGSETPGTSESATPESVSG | |
| | UGAUCCUGAACCGGUUGCUGAGUUCCGUUUCCGAGCAGAACCUGCCCGAAUCA | | WRLFKKIS | |
| | CAGUGCGGCUUCCGCCCCGAUCGGUCCACCAUCGAUAUGGUGUUCACCGUGCGU | | | |
| | CAGAUGCAGGAGAAGUGCCUGGAACAGAAUCUGAGCCUGUACAUCGUUUUCAU | | | |
| | CGAUCUGACUAAGGCCUUCGACACGGUGAACCGCGAUGCCCUGUGGGUGAUCC | | | |
| | UGAGCAAGCUGGGGUGCCCCGCUAAGUUCGUAAAGCUCAUCCAGUUGUUCCAC | | | |
| | GUUGAUAUGACGGGAGAGGUCCUGUCCGGUGGAGAAACCUCCGACCGGUUUAA | | | |
| | CAUCUCCAAUGGCGUGAAACAGGGCUGCGUCCUGGCCCCAGUGCUGUUCAACC | | | |
| | UGUUUUUCACACAGGUGCUGAGACAUGCGGUUAUGGAUCUUGACCUGGGUGUG | | | |
| | UAUAUCAAGUAUCGCUUGGACGGCAGUCUGUUCGAUCUCAGACGCCUGACAGC | | | |
| | UAAGACUAAGACUACCGAGCGCCUCAUUCUCGAAGCCCUGUUUGCCGACGAUU | | | |
| | GUGCCCUUAUGGCCCACCAGGAGAACCACCUGCAGACGAUUGUCGACCGCUUCU | | | |
| | CUACAGCGACCAAGCUGUUCGGCCUCACCAUCUCCCUCUCAAAGACCGAAGUCC | | | |
| | UGUUUCAGCCCGCACCCGGGAGACCCACGAAUCAGCCGUGCAUUACCAUUGACG | | | |
| | GGACCCAACUUUCCAACGUCAACACCUUCAAGUAUCUGGGAUCUACCAUCGCCA | | | |
| | AUGAUGGCAGCCUGGAUCAUGAAAUCAACGCAAGGAUCCAAAAGGCUAGCCAG | | | |
| | GCACUGGGCCGCCUCCGGUGCAAGGUCCUGCAGCACCGGGGCGUCUCCACUGCC | | | |
| | ACUAAACUGAAGGUGUACAACGCUGUCGUGCUCUCUUCCCUGCUUUAUGGCUG | | | |
| | CGAAACAUGGACUCUGUACCGGAAGCAUAUGAAACAGCUUGAGCAGUUCCACC | | | |
| | AGAGGAGCUUGCGUAGCAUCAUGAGGAUCCGCUGGCAGGACCGCAUCACCAAC | | | |
| | CAGGAGGUGCUGGACAGGGCUAAUUCCACCAGCAUCGAAGUUAUGGUGCUGAA | | | |
| | GACCCAGCUCCGUUGGUCUGGCCAUGUCAUUCGGAUGGACCCUCAGCGUAUCCC | | | |
| | CCGCCAGGUAUUCUACGGGGAACUGUCUGCGGGGCUCAGAAAGCAGGGCCGCC | | | |
| | CAAAGAAACGCUUUAAGGAUCAGCUGAAAAGCAAUCUGAAGUGGGCCGGCAUC | | | |
| | ACCCCCAAGCAGCUGGAGCUGGCGGCAUCUGACCGCUCCAGCUGGCGCACCCAC | | | |
| | AUUAACCACGCAGCUACUACCUUUGAGGACGAACGCCGGCGCAGACUGGCCGC | | | |
| | UGCACGCGAGAGGCGCCACCAAGCCACUACCGCCCCUCCCGUGACCACUGGGGU | | | |
| | CCCUUGCCCUAUGUGCCACAAGCUGUGUGCGUCUGCCUUCGGUUUGCAGUCCCA | | | |
| | CAUGCGUGUGCAUCGCCGCAGCGGCAGCGAGACUCCCGGAACCUCAGAGUCCGC | | | |
| | CACACCCGAAAGUGUGAGCGGCUGGCGGCUGUUCAAGAAGAUUAGCUGAAUGG | | | |
| | UUUAUAUUGCGGCCGCUUAAUUAAGCUGCCUUCUGCGGGGCUUGCCUUCUGGC | | | |
| | CAUGCCCUUCUUCUCUCCCUUGCACCUGUACCUCUUGGUCUUUGAAUAAAGCCU | | | |
| | GAGUAGGAAGUCUAGAAAAAAAAAAAAAAAAAAAAAAAAAAAAAAAAAAAAA | | | |
| | AAAAAAAAAAAAAAAAAAAAAAAAAAAAAAAAAAAAAAAAAAA | | | |
| Vingi- | AGGAAAUAAGAGAGAAAAGAAGAGUAAGAAGAAAUAUAAGAGCCACCAUGGAC | 15,020 | MDEYQRSLSRPLLTIMSINIEGLSLAKEELLAK | 15,002 |
| 1_Acar | GAGUACCAGCGCUCCUUGUCCCGCCCCCUGUUGACAAUCAUGAGUAUUAAUAU | | MSEDISCDILCIQETHRDITMRRPKILGMQLA | |
| RNAIVT | CGAAGGCUUGAGCCUCGCGAAAGAGGAACUGCUUGCCAAGAUGUCCGAGGACA | | VERPHRQYGSAIFVRSGVAISATSLTEVNNIEI | |
| 696 | UCAGCUGCGACAUUCUGUGCAUCCAAGAGACCCAUCGCGACAUCACCAUGCGUC | | LSVELDSCTVSSLYKPPGADFYFTPPTSCHNH | |
| | GCCCCAAGAUCCUCGGUAUGCAGCUUGCGGUGGAGCGCCCUCACCGCCAGUACG | | EAHFVVGDFNSHSCVWGYDEDDRNGEAVLT | |
| | GCUCCGCGAUUUUCGUGCGUUCCGGUGUGGCCAUUUCUGCUACCAGCCUCACCG | | WADNSRMSLLHDSKLPPSFNSGRWKRGYNP | |
| | AGGUUAACAAUAUUGAGAUCCUGUCAGUGGAGCUCGAUUCCUGUACCGUCUCC | | DLIFVKESISHQCTKRVLNPIPNTQHRPICCVA | |
| | AGUCUGUACAAACCUCCCGGUGCAGACUUCUACUUUACUCCCCCGACGUCUUGC | | YAAVRPKSVPFRRRYNFNKANWTKFTETLEA | |
| | CACAACCAUGAGGCUCAUUUUGUGGUUGGUGAUUUCAAUUCCCACUCCUGCGU | | AISDIEPSIENYDLFVEAVKRSSRLSIPRGCRTS | |
| | GUGGGGCUAUGACGAGGAUGACCGCAACGGCGAAGCUGUUCUGACCUGGGCCG | | YLPGLNEESLNQLQEYLRLFQENPYSDGTIAA | |
| | AUAACUCCCGCAUGUCCCUGCUCCACGAUAGUAAGCUGCCUCCCUCCUUCAACA | | GQKLSTALANAKKDRWIELLENLDMSKSSRK | |
| | GUGGGAGAUGGAAGCGCGGGUACAACCCUGAUCUUAUCUUCGUCAAAGAAUCC | | AWQLLRRLDSDPLVNPGHANVTPDQIAHQLI | |
| | AUCUCUCAUCAGUGUACCAAGCGCGUCCUCAACCCGAUUCCUAACACUCAGCAC | | QNGKTNCSRIKMKINRVPELETHQLSSPLNLK | |
| | CGCCCCAUUUGUUGCGUAGCAUAUGCUGCCGUGCGUCCCAAGUCUGUCCCCUUC | | ELREAIKRCKTGKAPGLDDLMMEQIKHLGAK | |
| | AGAAGGAGAUACAACUUCAACAAGGCUAACUGGACCAAGUUUACCGAAACCUU | | AENWLLKFYNQCLAHKQIPRAWRKTKIIAIL | |
| | GGAAGCGGCAAUCUCCGACAUUGAGCCAUCUAUCGAGAAUUAUGAUCUCUUCG | | KPGKDASNARNYRPISLLCHLYKVYERMLLN | |
| | UUGAGGCAGUCAAGCGGUCCUCUCGCCUGAGUAUCCCCCGUGGAUGUAGGACC | | RLGPVIEPKLIAQQAGFRPGKNCTGQILHLTE | |
| | UCCUACCUGCCCGGCCUGAACGAAGAGUCACUCAAUCAGCUGCAGGAAUACCU | | HIEEGYEKGCITGTVFVDLTAAYDTVQHRKM | |
| | GCGCCUGUUCCAAGAGAAUCCUUACUCCGAUGGCACCAUCGCUGCCGGACAAA | | LHKVYHITRDFDFTKTVQTLLENRSFYVEFQG | |
| | AACUGAGCACCGCUCUGGCGAAUGCUAAGAAAGACCGCUGGAUCGAGCUGCUC | | QKSRWRRQKNGLPQGSVLAPTLFNIFTNDQP | |
| | GAGAACCUGGACAUGUCCAAGUCUAGCCGGAAAGCUUGGCAGCUCCUGCGCCG | | QPPLTKSFIYADDLGLTTQAKDFETVEKQLTN | |
| | GCUGGACAGCGACCCCCUCGUGAAUCCUGGCCAUGCCAAUGUAACGCCGGACCA | | ALKDLSSYYKENHLKPNPAKTQVCAFHLRNR | |
| | GAUCGCCCAUCAACUGAUCCAGAACGGCAAGACCAAUUGCAGUAGAAUCAAGA | | EANRKLKVTWEGQELEHCFHPKYLGVTLDR | |
| | UGAAGAUCAACAGAGUACCCGAGUUGGAAACACACCAGCUGUCUAGUCCUCUC | | TLTYRKHCMNTKHKVAARNNILRKLTGSAW | |
| | AACCUCAAAGAGCUCCGCGAAGCAAUCAAAAGGUGUAAGACGGGCAAAGCUCC | | GADPQVIRTSALALSFSTAEYACPVWHKSAH | |
| | CGGUCUGGAUGACCUGAUGAUGGAACAGAUCAAACACUUGGGGGCCAAGGCUG | | AKQVDIALNETCRIITGCLKPTPVDKLYKLAG | |
| | AGAACUGGUUGCUGAAAUUCUACAACCAGUGCCUGGCUCACAAGCAGAUCCCC | | IAPPDVRREVAANGERKKVEHCESHPLHGYH | |
| | CGUGCGUGGCGCAAGACUAAGAUUAUCGCCAUCUUGAAGCCGGGCAAGGAUGC | | PPPTRLKSRKGFMRTTTPLDVPPAAARVSLW | |
| | UAGUAACGCCCGCAACUACCGUCCUAUUUCCCUCCUGUGUCACCUUUACAAGGU | | AAKPGNSNWMAPQEGLPPGANQEWATWKS | |
| | GUACGAGCGCAUGCUCCUGAACCGCUUGGGCCCCGUCAUCGAGCCUAAACUGA | | LNRLRSGVGRSKDNLARWHYLEESSTLCDCG | |
| | UCGCCCAACAGGCUGGUUUCCGCCCAGGUAAGAACUGCACUGGACAGAUCCUG | | AEQTTQHMYACPQCPASCTEEELFKATDNAV | |
| | CACCUUACGGAGCACAUCGAGGAAGGUUACGAGAAGGGCUGCAUCACCGGAAC | | AVARFWSKTIGGGSPKKKRKVSGSETPGTSES | |
| | CGUCUUCGUGGACCUGACUGCGGCCUACGACACGGUUCAGCACAGAAAAAUGC | | ATPESVSGWRLFKKIS | |
| | UCCACAAGGUAUAUCAUAUUACCCGGGAUUUCGACUUCACCAAAACAGUGCAG | | | |
| | ACGCUUCUGGAGAAUCGCUCCUUUUACGUCGAGUUCCAGGGUCAGAAAAGUCG | | | |
| | GUGGAGGCGCCAGAAGAACGGCUUGCCCCAGGGUAGCGUGCUCGCCCCAACCCU | | | |
| | GUUUAAUAUCUUCACCAACGACCAGCCACAGCCCCCGCUGACAAAAUCCUUUAU | | | |
| | CUAUGCCGACGAUCUUGGCCUGACCACGCAAGCCAAGGACUUUGAGACAGUCG | | | |
| | AGAAACAGCUCACAAACGCACUCAAGGACCUGAGUUCCUAUUACAAGGAGAAC | | | |
| | CAUCUCAAACCUAACCCCGCUAAGACACAGGUCUGCGCUUUUCACCUGAGGAA | | | |
| | UCGGGAGGCCAACCGUAAACUGAAGGUGACAUGGGAGGGACAGGAACUGGAGC | | | |
| | ACUGUUUCCACCCCAAGUAUUUGGGCGUGACUCUCGAUCGCACCCUUACGUAU | | | |
| | CGGAAGCACUGCAUGAACACUAAGCAUAAGGUGGCGGCCAGAAAUAACAUCCU | | | |
| | GCGUAAACUCACAGGAAGCGCCUGGGGCGCCGACCCACAGGUCAUCCGUACCAG | | | |
| | UGCUCUGGCCCUGUCUUUCUCCACUGCUGAAUAUGCGUGUCCGGUGUGGCACA | | | |
| | AGUCCGCCCACGCGAAGCAGGUGGAUAUUGCCCUGAACGAGACAUGCCGGAUU | | | |
| | AUCACUGGUUGCCUCAAGCCUACCCCCGUCGACAAGCUCUAUAAGUUGGCCGGC | | | |
| | AUUGCACCCCCUGAUGUCCGUCGCGAAGUCGCAGCCAAUGGCGAGCGGAAAAA | | | |
| | GGUAGAACACUGCGAAUCACAUCCGCUGCAUGGAUAUCAUCCCCCUCCCACCCG | | | |
| | GCUUAAGAGCCGUAAGGGCUUCAUGCGCACAACCACUCCGCUGGAUGUGCCUC | | | |
| | CCGCUGCCGCGCGCGUGAGUCUGUGGGCCGCUAAGCCCGGUAAUUCCAAUUGG | | | |
| | AUGGCACCGCAAGAGGGCCUCCCGCCCGGAGCCAAUCAAGAGUGGGCCACAUG | | | |
| | GAAGUCCUUGAACAGGCUGCGCUCCGGUGUGGGACGCUCUAAGGACAACCUGG | | | |
| | CCCGUUGGCACUAUCUGGAAGAGUCAUCCACCCUGUGCGACUGUGGUGCUGAA | | | |
| | CAGACUACCCAGCACAUGUACGCUUGCCCCCAAUGCCCUGCCUCCUGCACGGAA | | | |
| | GAGGAACUCUUUAAGGCAACCGAUAACGCAGUGGCAGUGGCGCGCUUUUGGAG | | | |
| | UAAGACAAUCGGCGGCGGCUCCCCCAAGAAGAAGCGGAAGGUGAGCGGCAGCG | | | |
| | AGACUCCCGGGACCUCAGAGUCCGCCACACCCGAAAGUGUGAGCGGCUGGCGGC | | | |
| | UGUUCAAGAAGAUUAGCUGAUUAAUUAAGCUGGAGCCUCGGUGGCCAUGCUUC | | | |
| | UUGCCCCUUGGGCCUCCCCCCAGCCCCUCCUCCCCUUCCUGCACCCGUACCCCCG | | | |
| | UGGUCUUUGAAUAAAGUCUGAUCUAGAAAAAAAAAAAAAAAAAAAAAAAAAA | | | |
| | AAAAAAAAAAAAAAAAAAAAAAAAAAAAAAAAAAAAAAAAAAAAAAAAAAAA | | | |
| | AA | | | |
| CR1- | AGGAAAUAAGAGAGAAAAGAAGAGUAAGAAGAAAUAUAAGAGCCACCAUGCUG | 15,021 | MLYTIFLVYGILCFFFVYFCIYLYITVYLCFLFF | 15517 |
| 1_PH | UAUACCAUCUUCCUCGUUUAUGGGAUCCUGUGUUUUUUCUUUGUGUAUUUCUG | | LFLLLCGDVESNPGPGRARGCRLLYCNIRGLH | |
| RNAIVT | CAUCUACCUGUACAUCACUGUUUAUCUUUGUUUUCUGUUCUUUCUGUUUCUGC | | ANLAELDFVSRGVDVVCCSETLVAGRRHDA | |
| 636 | UUCUGUGCGGUGACGUGGAAAGCAAUCCUGGACCAGGCAGAGCCCGUGGAUGU | | ELALAGFQSPFRRLCGSGPGFRGMAVYVRSG | |
| | CGGUUGCUGUAUUGCAACAUCCGCGGUCUGCAUGCUAAUCUGGCCGAGCUGGA | | FCAYRQSVHECACHEIIVVRVCGRLNNYYLF | |
| | CUUUGUUAGUCGCGGGGUGGACGUGGUCUGCUGUUCCGAGACUCUGGUGGCUG | | SLYRSPATDDSLYDCLLTAMASIQSTDPKAAF | |
| | GGCGUCGCCACGAUGCCGAGUUGGCCCUCGCUGGCUUCCAGUCCCCCUUUCGUA | | VFVGDVNAHHRDWLGSASPTDCHGVAALDF | |
| | GGCUCUGUGGCUCAGGCCCUGGCUUCCGUGGCAUGGCGGUGUACGUCAGGUCU | | CTLSSCVQLVRGSTHIAGNCLDLVMTDVPDL | |
| | GGGUUCUGUGCCUACCGGCAGAGUGUGCACGAAUGUGCCUGCCACGAGAUUAU | | MTVTVGSPIGSSDHSHLVVSLDLNQVVPVVD | |
| | CGUCGUUCGCGUGUGUGGACGUCUGAACAAUUACUAUCUGUUCUCUCUCUACC | | TRRVVFVKSRANWVAITRAVRTLPWRQIIIIS | |
| | GCUCCCCGGCCACCGAUGACUCCCUUUACGAUUGCCUUCUGACUGCCAUGGCCA | | EDPVSELNDLTVSILERFVPKRTILVRSRDKP | |
| | GCAUCCAGUCCACUGAUCCGAAGGCAGCCUUCGUCUUCGUUGGCGACGUAAAC | | WFDDQCRLAFEAKQAAYRAWRRSRDRTLW | |
| | GCACAUCACCGGGACUGGCUGGGAAGCGCCUCUCCAACAGAUUGUCACGGCGU | | QTYVDRRAEAKRVYEEAQRRLRQRSRESLLS | |
| | CGCCGCUCUGGACUUUUGCACCCUUUCCAGCUGCGUGCAACUCGUCCGUGGGUC | | IDHPHRWWSELKGSVFGAEPSLPPLVGPGGGI | |
| | CACUCAUAUCGCUGGAAACUGUCUGGAUCUGGUGAUGACCGACGUGCCUGACC | | ITDPLARAELLSAHFDGKQSRDVIALPHGCHP | |
| | UGAUGACCGUGACCGUCGGAUCCCCGAUUGGAAGUAGCGACCACUCCCACCUG | | EPRLTSLAFRSGAIKVLLEGLDPYGGVDPVG | |
| | GUGGUCUCACUGGAUCUCAACCAGGUCGUGCCUGUUGUGGAUACACGCAGGGU | | MFPLFYKQLADVLAPKLAVIFRRLIRLGNFPR | |
| | UGUGUUCGUGAAAAGCCGCGCCAACUGGGUCGCCAUCACUCGCGCUGUGAGGA | | CWRTGNITPIPKGPVSPYVANYRPITLTPILSK | |
| | CUCUGCCUUGGCGGCAGAUUAUCCACUCCGAGGACCCUGUAAGUGAGCUCAAU | | VFEKLIAGKLGRFAEVTGLLPAGQFAYRIGLG | |
| | GACCUGACCGUGUCUAUUCUGGAACGCUUUGUUCCCAAGCGCACCAUCCUCGU | | CCDALLSVSHHLQSALDCRSEARLVQLDFSA | |
| | GAGAAGCCGCGAUAAGCCUUGGUUCGAUGACCAGUGUAGACUGGCUUUCGAGG | | AFDRVNHRGLLYKLESFGVGGRVLSIIRDFVS | |
| | CUAAGCAGGCGGCUUACCGUGCUUGGCGUAGGAGUCGGGACCGCACGUUGUGG | | ERTQSVSVDGVLSASVGVVSGVPQGSVLGPL | |
| | CAGACCUAUGUGGACAGGCGGGCCGAGGCCAAGCGCGUGUAUGAAGAGGCUCA | | LFVLYTSDMFSSLENTLINYADDSTLMAVIPA | |
| | GAGGCGCCUUCGCCAGAGGAGCCGUGAAAGCCUGCUCAGUAUUGACCACCCUC | | PRLRDAVAQSLNRDLSRISAWCSAWSMKLN | |
| | AUCGCUGGUGGUCAGAGCUCAAGGGCUCCGUGUUCGGCGCCGAACCCAGCCUG | | ASKTKSMIISRSRTLVPQHPQLEIDDTLLQESS | |
| | CCCCCUCUCGUUGGUCCUGGCGGUGGAAUCAUUACCGAUCCCCUCGCCAGGGCC | | SLEILGVVFDEKLTFEPHIRRLVSRASTKIGLL | |
| | GAGCUGCUCUCCGCACAUUUUGAUGGAAAGCAGUCACGCGAUGUCAUCGCCUU | | RKVNSVFGDSQVARRCFYAFLLPVLEYCSPV | |
| | GCCCCACGGUUGCCACCCGGAGCCCCGCCUCACAUCUCUGGCCUUCAGGUCCGG | | WASAADTHLRLLDRLVSSASRLCADNDLVN | |
| | CGCUAUCAAGGUCCUCCUGGAAGGACUCGACCCCUACGGUGGCGUUGACCCCGU | | LSHRRRVAELCMFYKVYNNERHWLYSSLPA | |
| | CGGCAUGUUUCCUCUGUUUUACAAGCAGCUGGCGGACGUCCUGGCCCCAAAGU | | LKVFGRETRAACGAHSFTLEAVRCRTNQFCR | |
| | UGGCCGUUAUCUUUCGUCGGCUGAUCCGCCUCGGCAACUUUCCCCGCUGCUGGC | | CFVPWSAKVWNLLPASAFGRIGLQAFKSAVN | |
| | GCACUGGUAAUAUCACUCCCAUCCCCAAGGGCCCCGUGAGUCCUUACGUGGCCA | | GFLLDFLGGGSPKKKRKVSGSETPGTSESATP | |
| | AUUACCGUCCCAUCACCUUGACACCUAUCCUGUCUAAGGUUUUCGAAAAGCUG | | ESVSGWRLFKKIS | |
| | AUCGCAGGCAAGCUGGGUCGCUUUGCUGAAGUCACUGGCUUGCUCCCUGCUGG | | | |
| | UCAGUUUGCUUAUCGCAUCGGUCUGGGCUGCUGUGACGCUCUCCUGUCCGUGA | | | |
| | GCCAUCACCUGCAGUCCGCCCUGGACUGCCGCUCCGAAGCCCGCCUGGUGCAGC | | | |
| | UCGAUUUCUCCGCAGCGUUUGACCGCGUUAAUCACAGGGGUCUUCUGUAUAAA | | | |
| | UUGGAGUCCUUCGGCGUCGGGGGCCGGGUGCUGUCAAUUAUCCGUGAUUUCGU | | | |
| | AUCCGAGCGCACCCAGUCUGUAUCCGUGGACGGUGUUCUGUCCGCCAGCGUCG | | | |
| | GCGUGGUUAGCGGAGUCCCCCAGGGUAGCGUGCUGGGACCUCUGCUCUUUGUA | | | |
| | UUGUAUACGUCCGACAUGUUCUCUAGCCUGGAGAAUACCCUCAUUAACUAUGC | | | |
| | AGAUGACUCCACUUUGAUGGCAGUUAUUCCGGCCCCACGCCUGCGUGACGCCG | | | |
| | UAGCGCAGUCCCUGAAUAGGGACCUGUCACGCAUCAGUGCCUGGUGUUCAGCU | | | |
| | UGGUCCAUGAAGCUGAACGCGUCCAAGACCAAAAGCAUGAUUAUCUCAAGGUC | | | |
| | CAGGACUUUGGUGCCUCAACACCCCCAGCUGGAGAUCGACGAUACUUUGCUGC | | | |
| | AGGAGUCCUCAUCCCUGGAAAUCCUGGGCGUCGUGUUCGAUGAGAAGCUCACC | | | |
| | UUCGAGCCUCACAUCAGGCGGCUGGUGAGCCGCGCGUCUACCAAGAUCGGGCU | | | |
| | GCUCCGCAAGGUGAACUCCGUGUUCGGCGAUUCCCAGGUCGCGAGGCGUUGCU | | | |
| | UUUACGCUUUCCUGCUCCCUGUGCUGGAGUACUGCUCUCCGGUAUGGGCGAGU | | | |
| | GCCGCGGAUACCCAUCUUCGUCUUCUGGACCGCCUUGUCUCCAGCGCCAGCCGU | | | |
| | UUGUGUGCUGACAACGAUCUGGUGAACCUGAGUCACCGUCGGCGCGUGGCUGA | | | |
| | GCUGUGUAUGUUCUACAAGGUGUACAAUAACGAGAGGCAUUGGCUGUACUCAU | | | |
| | CCCUGCCAGCCCUGAAGGUCUUCGGGCGCGAAACGCGUGCCGCGUGCGGUGCUC | | | |
| | ACUCUUUUACGUUGGAGGCGGUUCGCUGUCGCACCAACCAGUUCUGCCGCUGC | | | |
| | UUUGUGCCUUGGUCUGCGAAGGUGUGGAACCUGCUCCCUGCCUCCGCUUUCGG | | | |
| | GAGAAUCGGUCUGCAGGCAUUUAAAAGCGCUGUGAACGGUUUCCUGUUGGACU | | | |
| | UUCUGGGCGGCGGCUCCCCCAAGAAGAAGCGGAAGGUGAGCGGCAGCGAGACU | | | |
| | CCCGGGACCUCAGAGUCCGCCACACCCGAAAGUGUGAGCGGCUGGCGGCUGUUC | | | |
| | AAGAAGAUUAGCUGAUUAAUUAAGCUGCCUUCUGCGGGGCUUGCCUUCUGGCC | | | |
| | AUGCCCUUCUUCUCUCCCUUGCACCUGUACCUCUUGGUCUUUGAAUAAAGCCU | | | |
| | GAGUAGGAAGUCUAGAAAAAAAAAAAAAAAAAAAAAAAAAAAAAAAAAAAAA | | | |
| | AAAAAAAAAAAAAAAAAAAAAAAAAAAAAAAAAAAAAAAAAAA | | | |
| RTE- | AGGAAAUAAGAGAGAAAAGAAGAGUAAGAAGAAAUAUAAGAGCCACCAUGAGC | 15,022 | MSGTPRVAFDSGKDLRNPIGQSPPALSRAAPG | 15518 |
| 3_BF | GGCACACCAAGAGUGGCAUUUGACAGCGGAAAGGACCUCAGAAAUCCCAUAGG | | QLGTDPSRSACFIGCLELRVLLDKWIVCRAPD | |
| RNAIVT | GCAGUCCCCACCUGCCCUCAGCCGGGCUGCCCCCGGACAGUUGGGGACAGACCC | | KQESKEKRRQKTQPIRIGSWNVRTMRTGLSD | |
| 635 | CUCACGUUCCGCAUGUUUUAUAGGGUGCCUGGAGCUUCGAGUCCUGUUGGACA | | DLTVIEDIRKTAAIDRELYRLNIDIVALQETRL | |
| | AAUGGAUCGUGUGCCGAGCUCCUGAUAAGCAGGAAUCCAAGGAGAAACGCCGC | | PDSGSLKEDSYTFFWQGKGMEETREHGVGFA | |
| | CAGAAAACUCAGCCUAUACGGAUUGGAAGCUGGAACGUCAGAACAAUGCGGAC | | VRNTLLHMIEPPTGGTERIITLRLSTHEGPVNL | |
| | AGGCCUGUCUGAUGACUUGACAGUUAUCGAGGACAUCCGUAAAACAGCCGCAA | | LCVYAPTLQATSEVKDQFYGQLDSAIKKIPVS | |
| | UUGACCGCGAACUUUAUCGCCUGAAUAUUGACAUUGUUGCGCUGCAAGAAACG | | EHIFILGDFNARVGTDQESWQTVLGHHGIGK | |
| | CGUUUGCCCGACAGCGGUUCUCUCAAGGAAGACAGCUAUACUUUCUUCUGGCA | | MNENGQRLLELCCYHNLCVTNTFFQNKAIHK | |
| | GGGUAAGGGUAUGGAGGAAACAAGGGAGCACGGCGUGGGGUUUGCCGUGAGAA | | ASWRHPRSQRWHQLDLVITRRTSLNSVCNTR | |
| | ACACUUUGCUCCACAUGAUUGAGCCUCCCACGGGUGGUACCGAGCGCAUCAUU | | AYHSADCDTDHSLIAARIKLRPKKLHHMKKK | |
| | ACACUUCGUUUAAGUACCCAUGAGGGCCCUGUGAAUCUCCUCUGUGUUUACGC | | GQPKIDVSKTMLPDRNQKFLECLEGTLNNIQP | |
| | UCCCACCCUGCAGGCGACAUCAGAGGUCAAAGAUCAAUUUUACGGGCAGUUAG | | QDAEHRWETLSKTIYSAAAQSYGKKERKNT | |
| | ACUCCGCUAUCAAGAAGAUACCCGUCAGCGAGCACAUUUUUAUCUUGGGAGAC | | DWFEAYISELEPVMDTKRKALVSYKQNPSSQ | |
| | UUUAACGCCCGGGUCGGGACGGACCAGGAGUCAUGGCAGACCGUGCUCGGACA | | NLQALKAARQEAQRASRRCANNYWLLLSERI | |
| | UCACGGGAUUGGGAAAAUGAACGAAAACGGGCAGCGGCUGCUCGAACUAUGUU | | QLASATGDIRRMYEGIKQATGKPIKKSAPLKA | |
| | GCUAUCACAACCUGUGCGUCACCAAUACCUUCUUCCAGAAUAAAGCCAUUCAU | | KSGEIITDKDKQMARWVEHYLDIYSTENSVS | |
| | AAAGCUAGUUGGAGACAUCCCAGAAGUCAACGAUGGCACCAGCUAGACUUGGU | | QDALDNIEDFSVLAELDADPTIEELSKAIDSM | |
| | AAUCACCAGGCGGACAAGCCUCAAUUCCGUUUGCAAUACCAGGGCCUAUCAUU | | SNGKAPGEDNIPAEIIKSGKSVLLEPLIIELLRL | |
| | CCGCGGACUGUGAUACUGAUCACAGCCUGAUCGCUGCGAGAAUCAAGCUGAGG | | CWKEGKVPQSMRNSKIVTLYKNKGDRTDCN | |
| | CCUAAGAAACUGCACCAUAUGAAGAAGAAAGGCCAGCCAAAGAUCGAUGUGUC | | SYRGISLLSIVGKVFAKVVLTRLQVLADRVYP | |
| | UAAAACUAUGCUCCCCGACAGGAACCAGAAGUUCCUUGAAUGCCUGGAAGGCA | | ESQCGFRAERSTTDMIFSVRQLQEKCREQQRP | |
| | CACUCAACAACAUCCAACCGCAGGAUGCAGAGCACAGGUGGGAGACCCUGUCC | | LYIAFIDLTKAFDLVSRRGLFQLLRKIGCPPQL | |
| | AAGACCAUCUACAGCGCCGCCGCACAGUCCUAUGGCAAGAAGGAGCGGAAGAA | | LDIIISFHEDMKGVVSFDGETSEPFAIRSGVKQ | |
| | CACAGACUGGUUCGAGGCUUAUAUCUCUGAGCUUGAGCCUGUGAUGGAUACGA | | GCVLAPTLFGIFFSLLLKSAFGHSTQGVHLHT | |
| | AGAGGAAAGCCCUGGUGAGUUAUAAGCAGAAUCCCAGCUCACAAAAUCUGCAG | | RSDGKLFNLARLRAKTKVRSVLIRDMLFADD | |
| | GCCCUGAAGGCUGCCCGCCAGGAAGCUCAGAGAGCCUCACGACGAUGCGCCAAC | | AALVAHVEDELQQLLNQFAHACSEFALTISIK | |
| | AACUACUGGUUGCUACUGUCUGAGAGAAUUCAACUAGCGUCCGCGACCGGCGA | | KTVVMGQDVPQPPVVTIGSEVLEVTDHFTYL | |
| | UAUUCGCCGCAUGUAUGAGGGCAUCAAGCAAGCCACCGGUAAACCUAUCAAAA | | GSTVTSNLSLDKEIDRRIARAAGVMTKLGTR | |
| | AAUCUGCCCCCCUUAAGGCUAAAUCCGGCGAGAUUAUAACCGAUAAGGACAAG | | VWNNSIILTLNTKLEVYRSCVLSTLLYGSETW | |
| | CAAAUGGCUCGCUGGGUCGAACACUACCUGGAUAUUUAUUCUACAGAGAACUC | | TTYAKQENRLESFHLRCLRRILGISWRDRVPN | |
| | UGUCUCUCAGGAUGCCCUGGAUAACAUCGAGGAUUUUUCUGUGCUGGCCGAAC | | TTVLERSCSLSIHLLLCQRRLRWLGHVSRMK | |
| | UCGAUGCUGAUCCAACCAUAGAAGAGUUAUCUAAGGCUAUAGACUCAAUGUCA | | DGRIPKDILFGELATGKRPVGRPALRFRDVCK | |
| | AACGGCAAAGCACCAGGCGAAGACAAUAUUCCAGCCGAAAUUAUAAAAAGUGG | | RDLKLTDIDPASWEQIAADRNRWRHTVKDG | |
| | UAAAUCUGUGCUCCUUGAACCGCUGCAUGAAUUACUGAGACUGUGUUGGAAAG | | LAKGQERRTEHLESRRRKRKEKPQQGNPSAFI | |
| | AGGGGAAAGUCCCGCAGUCAAUGCGAAACUCGAAAAUCGUAACUCUGUACAAG | | CPNCGRDCHARIGLQSHSRRCQPPSGSETPGT | |
| | AAUAAAGGAGAUAGGACUGACUGCAAUUCCUACCGCGGCAUAAGCUUGUUGUC | | SESATPESVSGWRLFKKIS | |
| | UAUCGUGGGCAAAGUAUUCGCUAAAGUGGUGCUAACCAGGCUGCAGGUGCUGG | | | |
| | CUGAUCGCGUGUACCCAGAGAGCCAGUGUGGCUUCCGAGCCGAGAGGAGUACC | | | |
| | ACUGACAUGAUCUUUUCAGUGCGGCAGCUUCAGGAGAAGUGCCGCGAGCAACA | | | |
| | ACGGCCUCUGUACAUCGCCUUUAUUGACUUGACUAAGGCAUUCGACUUAGUGA | | | |
| | GUAGGAGGGGACUUUUCCAGCUCCUGAGGAAGAUUGGUUGUCCUCCACAACUG | | | |
| | CUGGAUAUAAUUAUCUCGUUCCAUGAGGAUAUGAAGGGAGUCGUUAGUUUCGA | | | |
| | UGGGGAAACAAGCGAACCAUUCGCAAUUAGGUCUGGCGUCAAGCAAGGCUGCG | | | |
| | UUCUGGCACCUACGUUGUUUGGCAUCUUUUUCUCCCUCCUCCUGAAGUCCGCA | | | |
| | UUUGGGCACAGCACUCAGGGUGUGCACCUGCAUACCCGGUCUGAUGGGAAGCU | | | |
| | UUUUAACCUCGCCCGCCUCAGGGCCAAGACUAAGGUACGCUCUGUAUUAAUCA | | | |
| | GAGAUAUGCUGUUCGCAGACGACGCAGCGCUCGUUGCUCAUGUUGAGGACGAG | | | |
| | CUUCAACAGUUAUUGAAUCAGUUCGCACAUGCAUGCUCAGAAUUCGCCCUCAC | | | |
| | AAUUAGUAUCAAAAAAACUGUCGUGAUGGGUCAGGAUGUGCCACAGCCCCCAG | | | |
| | UGGUGACGAUCGGAAGUGAGGUCCUGGAGGUUACCGACCACUUUACGUACCUU | | | |
| | GGAAGCACUGUGACCUCCAACCUGUCCCUAGACAAAGAAAUCGACAGGCGCAU | | | |
| | UGCCCGGGCAGCCGGAGUCAUGACAAAACUGGGAACCCGAGUGUGGAAUAAUA | | | |
| | GUCACCUCACGCUGAAUACUAAGCUUGAAGUGUAUAGAUCGUGUGUUCUGAGC | | | |
| | ACACUGCUUUACGGGUCCGAAACCUGGACCACCUACGCUAAGCAGGAGAAUAG | | | |
| | ACUGGAGAGCUUUCACCUUAGGUGUCUUCGUCGAAUCCUAGGCAUUUCCUGGA | | | |
| | GAGAUCGGGUUCCCAACACAACCGUGUUGGAGAGAAGCUGCUCACUGAGUAUU | | | |
| | CACCUCUUACUGUGCCAGCGGCGGCUGCGGUGGCUGGGCCACGUAAGCAGGAU | | | |
| | GAAGGACGGACGUAUCCCGAAAGAUAUUCUCUUCGGGGAACUGGCUACUGGAA | | | |
| | AGCGUCCCGUCGGCCGCCCAGCUCUCCGCUUCAGGGACGUAUGUAAAAGAGAU | | | |
| | UUGAAACUAACUGAUAUCGAUCCGGCCUCCUGGGAACAGAUCGCAGCCGACCG | | | |
| | AAACCGUUGGCGCCACACUGUGAAGGACGGACUGGCAAAAGGGCAAGAAAGAC | | | |
| | GGACAGAGCACUUAGAAUCACGGCGGCGAAAGAGAAAGGAGAAGCCUCAGCAG | | | |
| | GGUAACCCAAGUGCCUUUAUCUGUCCUAAUUGCGGCAGGGACUGCCAUGCGCG | | | |
| | GAUAGGACUGCAAUCGCAUUCAAGAAGAUGUCAGCCCCCUAGCGGCAGCGAGA | | | |
| | CUCCCGGAACCUCAGAGUCCGCCACACCCGAAAGUGUGAGCGGCUGGCGGCUGU | | | |
| | UCAAGAAGAUUAGCUGAGCUGGAGCCUCGGUGGCCAUGCUUCUUGCCCCUUGG | | | |
| | GCCUCCCCCCAGCCCCUCCUCCCCUUCCUGCACCCGUACCCCCGUGGUCUUUGA | | | |
| | AUAAAGUCUGAAAAAAAAAAAAAAAAAAAAAAAAAAAAAAAAAAAAAAAAAA | | | |
| | AAAAAAAAAAAAAAAAAAAAAAAAAAAAAAAAAAAAAAA | | | |
| RTE- | AGGAAAUAAGAGAGAAAAGAAGAGUAAGAAGAAAUAUAAGAGCCACCAUGCCC | 15,023 | MPRKNWNCGRRTGDEKRKMMFGCWNVQGI | 15,024 |
| 25_LMi | CGCAAAAAUUGGAACUGCGGGCGACGAACCGGGGAUGAAAAACGUAAGAUGAU | | STKIDLLPAELDMFNIDVVVLSETKRKGKGEE | |
| RNAIVT | GUUUGGAUGCUGGAAUGUGCAGGGAAUCUCGACAAAGAUAGAUCUGCUGCCAG | | ELDNYVHIWSGVSKAVRAKAGVSIMIQKKW | |
| 927 | CAGAACUGGACAUGUUCAACAUUGAUGUCGUGGUGCUCUCCGAGACAAAGAGG | | KKRITNWTFINERIITVEMTLFAREVVIIGVYA | |
| | AAGGGCAAGGGUGAAGAGGAGUUGGAUAAUUACGUUCACAUCUGGUCAGGGGU | | PTNDTKDKEKDAFWDTLRETIEKIPRRKELII | |
| | CUCUAAGGCUGUCAGAGCCAAGGCUGGUGUCUCCAUCAUGAUACAGAAAAAGU | | MGDMNGRVGIRESCKIVGKHGEAEYNDNGE | |
| | GGAAGAAACGUAUCACUAACUGGACGUUCAUAAAUGAGCGCAUCAUAACCGUU | | RLIDICAQFDLKITNTFFKHKDIHKYTWQQNT | |
| | GAAAUGACACUGUUUGCGCGGGAAGUUGUUAUCAUCGGCGUAUACGCCCCCAC | | KELRSIIDYIIIRQTSSFKAADVRSYRGAQCGS | |
| | CAACGACACUAAGGAUAAAGAGAAAGACGCGUUUUGGGACACUCUCAGAGAAA | | DIIYLVKMKSFWPWKNATNDTSNINKMNCSE | |
| | CCAUCGAAAAAAUCCCCAGAAGGAAGGAACUUAUCAUAAUGGGUGAUAUGAAU | | KVQNVHFNIDSLQDESIRTFFKARMERTLDES | |
| | GGCCGGGUGGGGAUUAGAGAAUCCUGCAAGAUAGUGGGCAAGCAUGGAGAAGC | | FEGSTEEIYEYIKTKVKNVASEVLGIKENNPK | |
| | AGAGUAUAACGACAAUGGAGAGCGUCUUAUUGAUAUUUGCGCCCAGUUCGACU | | RAAEWWSEEIETSVKEKRNAFVQWLNDKSE | |
| | UGAAGAUCACUAACACGUUUUUCAAGCACAAGGACAUCCACAAGUAUACAUGG | | GTRSKYKEKKNEVEKKIRLAKNEAWERTCA | |
| | CAGCAAAACACGAAAGAGCUGAGAUCGAUCAUCGAUUAUAUUAUUAUAAGGCA | | NVNSKLGFGRAKEAWSVLKALRQDTKGKSN | |
| | GACCUCUAGCUUCAAAGCUGCUGACGUCAGAUCAUACCGUGGAGCUCAGUGCG | | LQLVTQKEWEEYFKKLLNEDRDEYLEEGTVE | |
| | GUAGCGACCACUAUCUCGUAAAAAUGAAAAGCUUUUGGCCGUGGAAAAACGCC | | ENEHHDDEILISESEVLQVLRTGKNGKSPGPG | |
| | ACCAAUGAUACAAGCAACAUCAAUAAGAUGAACUGUUCCGAGAAGGUGCAAAA | | NINMEFLKYGGDKIVKLILQLFNKMLHGDSV | |
| | CGUGCAUUUCAAUAUCGAUUCCCUGCAGGACGAGAGCAUUCGGACAUUUUUCA | | PKEMKLGYISTIFKKGDRKICSNYRGICVTNT | |
| | AGGCCCGUAUGGAGAGGACCUUGGACGAGAGUUUCGAGGGGUCCACAGAAGAG | | LMRIFGKIIKNKLEKNFRTQQEQCGFTAGRSC | |
| | AUCUACGAGUAUAUAAAGACAAAAGUCAAAAACGUUGCCUCUGAGGUGCUGGG | | VDHIFTLRQILEKHREKSKNVGLIFIDLEKAYD | |
| | CAUCAAGGAAAAUAAUCCUAAGCGAGCCGCAGAGUGGUGGUCUGAAGAGAUUG | | TVPRKLLWRALHRANINTSLIKIIEQMYKDNI | |
| | AGACAUCUGUGAAAGAGAAGCGCAAUGCAUUCGUGCAGUGGCUGAACGAUAAG | | CQVKIGNTLSQKFRTSKGLLQGCPMSPTLFKI | |
| | UCAGAGGGUACUCGAAGUAAGUACAAGGAAAAAAAGAAUGAAGUGGAAAAAA | | YIDICLRTWSQKCNSMGLEIRDGVYLHHLLF | |
| | AGAUCAGACUAGCUAAAAAUGAAGCAUGGGAACGGACCUGUGCCAAUGUGAAC | | ADDQVVIAQDGEDANYMCNQLAIAYKNWG | |
| | AGCAAGCUGGGAUUCGGACGCGCCAAGGAAGCGUGGUCUGUCCUCAAAGCUUU | | LKINYQKTEYLTNDPHELRIEGKKIKKVNTFC | |
| | ACGCCAGGACACCAAGGGUAAAAGUAACCUGCAACUUGUUACUCAGAAGGAGU | | YLGSILETEGKSDSEINKRISSGRKVIGMLNSV | |
| | GGGAAGAGUAUUUUAAGAAACUUCUGAAUGAAGAUCGCGACGAGUACCUCGAG | | LWSRNVMNRTKKIIYKSIFESAVLYGAETWTI | |
| | GAGGGCACAGUGGAAGAGAAUGAACAUCACGAUGAUGAGAUUCUGAUUAGCGA | | NQKHTKKLQALEMDFWRRSARISRKEKRRN | |
| | AAGCGAAGUACUCCAGGUCCUGAGGACGGGGAAAAACGGCAAGUCCCCUGGAC | | TEVIKRMEIIERIDEVMDRKKLRWYGHVRRM | |
| | CUGGGAAUAUUAACAUGGAGUUUCUCAAAUACGGAGGGGACAAGAUCGUAAAG | | EDTRIPKLVLEWQPEGRRRRGRPVTTWIKNV | |
| | CUCAUUCUUCAGCUGUUCAACAAGAUGCUACAUGGCGACUCUGUGCCAAAAGA | | QLTMNRLGAEEEDTQDRHTWRNIVNNSGSET | |
| | GAUGAAGUUGGGGUAUAUCUCCACAAUUUUUAAGAAAGGCGACCGAAAGAUUU | | PGTSESATPESVSGWRLFKKIS | |
| | GUUCAAAUUACAGGGGUAUUUGUGUAACUAACACCCUAAUGCGGAUCUUCGGA | | | |
| | AAAAUUAUCAAGAAUAAACUGGAAAAGAACUUUCGGACGCAACAGGAACAGUG | | | |
| | CGGUUUUACAGCGGGGCGCUCUUGCGUGGAUCACAUCUUCACCCUGAGACAGA | | | |
| | UAUUGGAGAAGCACAGAGAAAAAAGUAAAAACGUGGGACUUAUUUUCAUAGAC | | | |
| | UUAGAGAAAGCAUACGACACUGUGCCCCGGAAAUUGUUAUGGCGGGCCCUACA | | | |
| | CAGGGCAAAUAUCAACACAUCACUGAUUAAAAUUAUCGAGCAGAUGUACAAAG | | | |
| | ACAACAUUUGUCAGGUGAAGAUCGGCAACACCCUGAGCCAGAAAUUUCGAACU | | | |
| | AGUAAGGGGCUGUUGCAGGGAUGCCCUAUGUCCCCAACUCUCUUUAAGAUCUA | | | |
| | UAUCGAUAUUUGUCUGCGGACCUGGUCACAAAAAUGUAAUUCCAUGGGUCUUG | | | |
| | AGAUCCGGGAUGGCGUAUAUCUCCAUCAUUUACUAUUCGCCGAUGAUCAAGUG | | | |
| | GUUAUCGCCCAGGACGGCGAGGACGCCAAUUACAUGUGUAACCAAUUAGCCAU | | | |
| | AGCUUACAAAAACUGGGGCCUGAAGAUCAAUUACCAAAAAACUGAGUAUCUGA | | | |
| | CGAACGACCCGCACGAACUGAGAAUCGAGGGGAAGAAGAUUAAAAAGGUGAAC | | | |
| | ACCUUCUGCUACUUGGGCAGUAUCCUUGAAACCGAAGGGAAGUCAGACAGUGA | | | |
| | GAUUAAUAAAAGGAUUAGCUCCGGCCGUAAGGUCAUCGGCAUGCUGAAUUCAG | | | |
| | UUCUGUGGAGCCGGAACGUCAUGAAUAGAACAAAGAAAAUUAUUUAUAAGUCU | | | |
| | AUAUUCGAGAGCGCUGUCCUCUAUGGCGCUGAGACUUGGACAAUCAACCAGAA | | | |
| | ACAUACCAAAAAGCUGCAGGCACUCGAGAUGGACUUUUGGCGACGCAGUGCAC | | | |
| | GCAUCUCUCGGAAGGAAAAAAGACGGAACACCGAAGUGAUUAAAAGGAUGGAG | | | |
| | AUCAUAGAGAGAAUUGAUGAGGUCAUGGACAGGAAGAAGCUUAGGUGGUACGG | | | |
| | ACACGUCAGGAGGAUGGAGGAUACCAGGAUCCCCAAGUUGGUGCUGGAGUGGC | | | |
| | AGCCUGAGGGACGCCGCCGAAGAGGGCGCCCAGUGACUACAUGGAUAAAAAAC | | | |
| | GUUCAACUGACCAUGAACAGACUCGGCGCCGAAGAAGAGGACACCCAGGAUAG | | | |
| | GCAUACUUGGCGGAAUAUUGUGAAUAAUAGCGGCAGCGAGACUCCCGGAACCU | | | |
| | CAGAGUCCGCCACACCCGAAAGUGUGAGCGGCUGGCGGCUGUUCAAGAAGAUU | | | |
| | AGCUGAGCUGGAGCCUCGGUGGCCAUGCUUCUUGCCCCUUGGGCCUCCCCCCAG | | | |
| | CCCCUCCUCCCCUUCCUGCACCCGUACCCCCGUGGUCUUUGAAUAAAGUCUGAA | | | |

### Example 13: Evaluation of Gene Editing of Primary Human T Cells with a BCMA CAR by a Retrotransposon-Based Gene Modifying System

[1271] The RTE1_MD gene modifying system comprising a BCMA-CAR template RNA was introduced into primary human CD3+ T cells. The BCMA CAR template RNA for use with the gene modifying polypeptide comprised the following sequences from 5′ to 3′: 5′ UTR, tkPa, BCMA CAR, Kozak, MND promoter, 3′ UTR. The BCMA CAR sequence in the template RNA comprised SEQ ID NO: 15491, encoding the amino acid of SEQ ID NO: 15490. Briefly, human CD3+ T cells stored in liquid nitrogen from donors were thawed in TexMACS culture media (Miltenyi) supplemented with 5% Human AB serum, IL2 (20 IU/mL; Miltenyi), IL7 (10 ng/mL; Miltenyi), and IL15 (5 ng/mL; Miltenyi). Cells were activated immediately post thaw by supplementing the culture media with TransACT (according to manufacturer's protocol) for two days.

[1272] Activated T cells were electroporated with mRNA encoding RTE1 MD gene modifying polypeptide (with SV40 NLS at the N-terminus of the polypeptide, SV40 NLS at the C-terminus of the polypeptide, or No NLS) and BCMA CAR template RNA 48 hours post activation. As controls, T cells were electroporated only with either the RTE1_MD driver mRNA or the BCMA CAR template alone under the same conditions. For the electroporation, 20-100 million T cells per condition were electroporated with 500 μg/mL of RNA (mass ratio of 200 template:1 driver) in OptiMEM to maintain a cell concentration of 4×10⁸ cells/mL. Post Electroporation, conditions were quenched in expansion media (TexMACS, 100 IU/mL IL2, 10 ng/mL of IL7, 5 ng/mL of IL15, 5% Human AB serum) and expanded until day 9 post initial thaw. Test and control condition cells were analyzed by flow cytometry for CAR expression on days 5, 7, and 9 post-thaw.

[1273] On day 9, CART cells were harvested, and function was assessed via a BCMA target cell killing assay. Briefly, BCMA-CART cells were co-cultured for 24 hours with BCMA-positive tumor cell lines (H929) at serially decreasing T cell (effector) to tumor cell ratios. Cells from co-culture were stained with antibodies to uniquely identify surface markers for both target cells and effector cells. Stained co-cultures were acquired on a flow cytometer with dead cell exclusion via a vital dye. Targets were positively identified during analysis and absolute counts of target cells for each condition were generated by volumetric readout by the flow cytometer. All conditions were normalized to a target only well to control for tumor growth via the following equation: % Killing=1−(number of target cells in test condition/number of target cells in normalization control)*100.

[1274] As shown in FIG. 25, the RTE-1_MD gene modifying system introduced BCMA CAR in human primary T cells obtained from two different donors. On average, ˜20% of activated T cells co-electroporated with both mRNA encoding the RTE1_MD gene modifying polypeptide and the BCMA CAR template RNA expressed the BCMA CAR at 5 days post electroporation. In comparison, cells treated with either mRNA encoding RTE1_MD gene modifying polypeptide alone or BCMA CAR template alone did not show any BCMA CAR expression. These results demonstrate that RTE1-MD gene modifying systems can be used to insert and express a therapeutic transgene (a BCMA CAR) into human primary T cells.

[1275] As shown in FIG. 25, the primary human T cells from two donors that express BCMA-CAR (as delivered by the RTE1_MD gene modifying system) killed BCMA positive tumor cells in a dose dependent manner. Overall, over 50% killing was observed for both donors with a 2 or 4 ratio of effector T cells to tumor cells. These data, taken together, indicate that the BCMA CAR T cells produced using RTE1_MD gene modifying systems represent a functional and potent CART product that controlled tumor growth in vitro.

### Example 14: Evaluation of Gene Editing of Primary Human T Cells with a CD20 CAR by a Retrotransposon-Based Gene Modifying System

[1276] The RTE1_MD gene modifying system comprising a CD20 CAR template RNA was introduced into primary human CD3+ T cells. Briefly, human CD3+ T cells stored in liquid nitrogen from one donor were thawed in TexMACS culture media (Miltenyi) supplemented with 5% Human AB serum, IL2 (20 IU/mL; Miltenyi), IL7 (10 ng/mL; Miltenyi), and IL15 (5 ng/mL; Miltenyi). Cells were activated immediately post thaw by supplementing the culture media with TransACT (according to manufacturer's protocol) for two days.

[1277] Activated T cells were electroporated with mRNA encoding RTE-1_MD gene modifying polypeptide (described in Example 6) and CD20 CAR template RNA 48 hours post activation. The CD20 CAR template RNA for use with the gene modifying polypeptide comprised the following sequences from 5′ to 3′. 5′UTR, TkPA, CD20 CAR, Kozak, MND promoter, 3′UTR. Sequences of the CD20 CAR are shown below. As a control, T cells were electroporated without RNA. For the electroporation, 0.5 million T cells per condition were electroporated with 250 ug/mL of RNA (mass ratio of 10 template:1 driver) in P3 solution with Supplement 1 to maintain a cell concentration of 25×10⁶ cells/mL. Post Electroporation, conditions were quenched in expansion media (TexMACS, 100 IU/mL IL2, 10 ng/mL of IL7, 5 ng/mL of IL15, 5% Human AB serum) and expanded until day 9 post initial thaw and activation. Test and control condition cells were analyzed by flow cytometry for CAR expression on days 5, 7 and 9 post-thaw.

[1278] As shown in FIG. 26, the RTE-1_MD gene modifying system introduced the CD20 CAR into human primary T cells obtained from one healthy human donor. About 9% of the electroporated T cells expressed CAR at 5 days post electroporation.

CD20CAR full sequence (nucleotide):
(SEQ ID NO: 15549)
ATGGAGACAGACACACTCCTGCTATGGGTGCTGCTGCTCTGGGTTCCAGGTTCCACA
GGTGACATTGTGCTGACCCAATCTCCAGCTATCCTGTCTGCATCTCCAGGGGAGAAG
GTCACAATGACTTGCAGGGCCAGCTCAAGTGTAAATTACATGGACTGGTACCAGAA
GAAGCCAGGATCCTCCCCCAAACCCTGGATTTATGCCACATCCAACCTGGCTTCTGG
AGTCCCTGCTCGCTTCAGTGGCAGTGGGTCTGGGACCTCTTACTCTCTCACAATCAG
CAGAGTGGAGGCTGAAGATGCTGCCACTTATTACTGCCAGCAGTGGAGTTTTAATCC
ACCCACGTTCGGAGGGGGGACCAAGCTGGAAATAAAAGGCAGTACTAGCGGTGGTG
GCTCCGGGGGCGGTTCCGGTGGGGGCGGCAGCAGCGAGGTGCAGCTGCAGCAGTCT
GGGGCTGAGCTGGTGAAGCCTGGGGCCTCAGTGAAGATGTCCTGCAAGGCTTCTGG
CTACACATTTACCAGTTACAATATGCACTGGGTAAAGCAGACACCTGGACAGGGCCT
GGAATGGATTGGAGCTATTTATCCAGGAAATGGTGATACTTCCTACAATCAGAAGTT
CAAAGGCAAGGCCACATTGACTGCAGACAAATCCTCCAGCACAGCCTACATGCAGC
TCAGCAGCCTGACATCTGAGGACTCTGCGGACTATTACTGTGCAAGATCTAATTATT
ACGGTAGTAGCTACTGGTTCTTCGATGTCTGGGGCGCAGGGACCACGGTCACCGTCT
CCTCAGAGAGCAAGTACGGACCGCCCTGCCCCCCTTGCCCTATGTTCTGGGTGCTGG
TGGTGGTCGGAGGCGTGCTGGCCTGCTACAGCCTGCTGGTCACCGTGGCCTTCATCA
TCTTTTGGGTGaggagtaagaggagcaggctcctgcacagtgactacatgaacatga
ctccccgccgccccgggcccacccgcaagcattaccagccctatgccccaccacgcg
acttcgcagcctatcgctccTTCAGCAGAAGCGCCGACGCCCCTGCCTACCAGCAGG
GCCAGAATCAGCTGTACAACGAGCTGAACCTGGGCAGAAGGGAAGAGTACGACGTCC
TGGATAAGCGGAGAGGCCGGGACCCTGAGATGGGCGGCAAGCCTCGGCGGAAGAACC
CCCAGGAAGGCCTGTATAACGAACTGCAGAAAGACAAGATGGCCGAGGCCTACAGCG
AGATCGGCATGAAGGGCGAGCGGAGGCGGGGCAAGGGCCACGACGGCCTGTATCAGG
GCCTGTCCACCGCCACCAAGGATACCTACGACGCCCTGCACATGCAGGCCCTGCCCCCAAGG
CD20CAR full sequence (protein):
(SEQ ID NO: 15548)
METDTLLLWVLLLWVPGSTGDIVLTQSPAILSASPGEKVTMTCRASSSVNYMDWYQKK
PGSSPKPWIYATSNLASGVPARFSGSGSGTSYSLTISRVEAEDAATYYCQQWSFNPPTFG
GGTKLEIKGSTSGGGSGGGSGGGGSSEVQLQQSGAELVKPGASVKMSCKASGYTFTSY
NMHWVKQTPGQGLEWIGAIYPGNGDTSYNQKFKGKATLTADKSSSTAYMQLSSLTSED
SADYYCARSNYYGSSYWFFDVWGAGTTVTVSSESKYGPPCPPCPMFWVLVVVGGVLA
CYSLLVTVAFIIFWVRSKRSRLLHSDYMNMTPRRPGPTRKHYQPYAPPRDFAAYRSFSRS
ADAPAYQQGQNQLYNELNLGRREEYDVLDKRRGRDPEMGGKPRRKNPQEGLYNELQK
DKMAEAYSEIGMKGERRRGKGHDGLYQGLSTATKDTYDALHMQALPPR

### Example 15: Evaluation of Gene Editing of Primary Human T Cells with GFP and a BCMA CAR by a Retrotransposon-Based Gene Modifying System

[1279] The Vingi-1_Acar gene modifying system comprising a BCMA-CAR template RNA and a GFP template RNA was introduced into primary human CD3+ T cells. The BCMA CAR template RNA for use with the gene modifying polypeptide comprised the following sequences from 5′ to 3′: Vingi 5′UTR, tkPA, BCMA CAR, EF1a short promoter, Vingi 3′ UTR. The GFP template RNA for use with the gene modifying polypeptide comprised the following sequences from 5′ to 3′: Vingi 5′UTR, tkPA, GFP, EF1a short promoter, Vingi 3′ UTR. The sequence of the EF1a short promoter is included below.

EF1a short promoter:
(SEQ ID NO: 15545)
gggcagagcgcacatcgcccacagtccccgagaagttggggggaggggtc
ggcaattgatccggtgcctagagaaggtggcgcggggtaaactgggaaag
tgatgtcgtgtactggctccgcctttttcccgaggggggggagaaccgta
tataagtgcagtagtcgccgtgaacgttctttttcgcaacgggtttgccg
ccagaacacag

[1280] Briefly, human CD3+ T cells stored in liquid nitrogen from 3 donors were thawed in TexMACS culture media (Mitenyi) supplemented with 5% Human AB serum, IL2 (20 IU/mL; Miltenyi), IL7 (10 ng/mL; Miltenyi), and IL15 (5 ng/mL; Miltenyi). Cells were activated immediately post thaw by supplementing the culture media with TransACT (according to manufacturer's protocol) for two days.

[1281] Activated T cells were electroporated with mRNA encoding Vingi-1_Acar gene modifying polypeptide (as described in Example 5), BCMA-CAR template RNA, and GFP template RNA at 48 hours post activation. As a control, T cells were electroporated with only Vingi-1_Acar driver under the same conditions. For the electroporation, 5 million T cells per condition were electroporated with 500 μg/mL of RNA (mass ratio of 1 template:1 template:1 driver) in OptiMEM to maintain a cell concentration of 4×10⁸ cells/mL. Post electroporation, conditions were quenched in expansion media (TexMACS, 20 IU/mL IL2, 10 ng/mL of IL7, 5 ng/mL of IL15, 5% Human AB serum) and expanded until day 10 post initial thaw. Test and control conditions were analyzed by flow cytometry for CAR and GFP expression on days 5, 7, and 10 post thaw.

[1282] As shown in FIG. 27, the Vingi-1_Acar gene modifying system introduced both the BCMA CAR and GFP in primary human T cells obtained from 3 different donors. On average, around 2% of activated T cells co-electroporated with the mRNA encoding the Vingi-1_Acar gene modifying polypeptide, the BCMA_CAR template RNA, and the GFP template RNA expressed both the CAR and GFP at 5 days post electroporation. In comparison, cells treated with mRNA encoding Vingi-1_Acar gene modifying polypeptide alone, mRNA encoding the Vingi-1_Acar gene modifying polypeptide plus the BCMA_CAR template RNA or mRNA encoding the Vingi-1_Acar gene modifying polypeptide plus the GFP template RNA did not show any CAR-GFP double positive expression. These results demonstrate that Vingi-1_Acar gene modifying systems can be utilized to insert and express multiple transgenes into primary human T cells.

The application's sequence listing, which the Patent Office published only in electronic form, follows.

SEQUENCE LISTING (15550 sequences)

SEQ ID NO: 1-8 - skipped (8 entries)

SEQ ID NO: 9 - protein, 30 aa, synthetic construct
MDSLLMNRRKFLYQFKNVRWAKGRRETYLC

SEQ ID NO: 10 - protein, 28 aa, synthetic construct
PKKRKVEGADKRTADGSEFESPKKKRKV

SEQ ID NO: 11 - protein, 22 aa, synthetic construct
RKSGKIAAIWKRPRKPKKKRKV

SEQ ID NO: 12 - protein, 18 aa, synthetic construct
KRTADGSEFESPKKKRKV

SEQ ID NO: 13 - protein, 17 aa, synthetic construct
KKTELQTTNAENKTKKL

SEQ ID NO: 14 - protein, 19 aa, synthetic construct
KRGINDRNFWRGENGRKTR

SEQ ID NO: 15 - protein, 16 aa, synthetic construct
KRPAATKKAGQAKKKK

SEQ ID NO: 16 - protein, 29 aa, synthetic construct
PKKKRKVEGADKRTADGSEFESPKKKRKV

SEQ ID NO: 17 - protein, 25 aa, synthetic construct
KRASSQALGTIPKRRSSSRFIKRKK

SEQ ID NO: 18 - protein, 7 aa, synthetic construct
RKKRKKK

SEQ ID NO: 19-24 - skipped (6 entries)

SEQ ID NO: 25 - protein, 4 aa, synthetic construct
SGGS

SEQ ID NO: 26 - protein, 4 aa, synthetic construct
GGGS

SEQ ID NO: 27 - protein, 5 aa, synthetic construct
GGGGS

SEQ ID NO: 28 - protein, 5 aa, synthetic construct
EAAAK

SEQ ID NO: 29-101 - skipped (73 entries)

SEQ ID NO: 102 - protein, 6 aa, synthetic construct
GGSGGS

SEQ ID NO: 103 - protein, 9 aa, synthetic construct
GGSGGSGGS

SEQ ID NO: 104 - protein, 12 aa, synthetic construct
GGSGGSGGSGGS

SEQ ID NO: 105 - protein, 15 aa, synthetic construct
GGSGGSGGSGGSGGS

SEQ ID NO: 106 - protein, 18 aa, synthetic construct
GGSGGSGGSGGSGGSGGS

SEQ ID NO: 107 - protein, 5 aa, synthetic construct
GGGGS

SEQ ID NO: 108 - protein, 10 aa, synthetic construct
GGGGSGGGGS

SEQ ID NO: 109 - protein, 15 aa, synthetic construct
GGGGSGGGGSGGGGS

SEQ ID NO: 110 - protein, 20 aa, synthetic construct
GGGGSGGGGSGGGGSGGGGS

SEQ ID NO: 111 - protein, 25 aa, synthetic construct
GGGGSGGGGSGGGGSGGGGSGGGGS

SEQ ID NO: 112 - protein, 30 aa, synthetic construct
GGGGSGGGGSGGGGSGGGGSGGGGSGGGGS

SEQ ID NO: 113 - skipped

SEQ ID NO: 114 - protein, 4 aa, synthetic construct
GGGG

SEQ ID NO: 115 - protein, 5 aa, synthetic construct
GGGGG

SEQ ID NO: 116 - protein, 6 aa, synthetic construct
GGGGGG

SEQ ID NO: 117 - protein, 7 aa, synthetic construct
GGGGGGG

SEQ ID NO: 118 - protein, 8 aa, synthetic construct
GGGGGGGG

SEQ ID NO: 119 - skipped

SEQ ID NO: 120 - protein, 6 aa, synthetic construct
GSSGSS

SEQ ID NO: 121 - protein, 9 aa, synthetic construct
GSSGSSGSS

SEQ ID NO: 122 - protein, 12 aa, synthetic construct
GSSGSSGSSGSS

SEQ ID NO: 123 - protein, 15 aa, synthetic construct
GSSGSSGSSGSSGSS

SEQ ID NO: 124 - protein, 18 aa, synthetic construct
GSSGSSGSSGSSGSSGSS

SEQ ID NO: 125 - protein, 5 aa, synthetic construct
EAAAK

SEQ ID NO: 126 - protein, 10 aa, synthetic construct
EAAAKEAAAK

SEQ ID NO: 127 - protein, 15 aa, synthetic construct
EAAAKEAAAKEAAAK

SEQ ID NO: 128 - protein, 20 aa, synthetic construct
EAAAKEAAAKEAAAKEAAAK

SEQ ID NO: 129 - protein, 25 aa, synthetic construct
EAAAKEAAAKEAAAKEAAAKEAAAK

SEQ ID NO: 130 - protein, 30 aa, synthetic construct
EAAAKEAAAKEAAAKEAAAKEAAAKEAAAK

SEQ ID NO: 131 - skipped

SEQ ID NO: 132 - protein, 5 aa, synthetic construct
PAPAP

SEQ ID NO: 133 - protein, 7 aa, synthetic construct
PAPAPAP

SEQ ID NO: 134 - protein, 9 aa, synthetic construct
PAPAPAPAP

SEQ ID NO: 135 - protein, 11 aa, synthetic construct
PAPAPAPAPAP

SEQ ID NO: 136 - protein, 13 aa, synthetic construct
PAPAPAPAPAPAP

SEQ ID NO: 137 - protein, 6 aa, synthetic construct
GGSGGG

SEQ ID NO: 138 - protein, 6 aa, synthetic construct
GGGGGS

SEQ ID NO: 139 - protein, 6 aa, synthetic construct
GGSGSS

SEQ ID NO: 140 - protein, 6 aa, synthetic construct
GSSGGS

SEQ ID NO: 141 - protein, 8 aa, synthetic construct
GGSEAAAK

SEQ ID NO: 142 - protein, 8 aa, synthetic construct
EAAAKGGS

SEQ ID NO: 143 - protein, 6 aa, synthetic construct
GGSPAP

SEQ ID NO: 144 - protein, 6 aa, synthetic construct
PAPGGS

SEQ ID NO: 145 - protein, 6 aa, synthetic construct
GGGGSS

SEQ ID NO: 146 - protein, 6 aa, synthetic construct
GSSGGG

SEQ ID NO: 147 - protein, 8 aa, synthetic construct
GGGEAAAK

SEQ ID NO: 148 - protein, 8 aa, synthetic construct
EAAAKGGG

SEQ ID NO: 149 - protein, 6 aa, synthetic construct
GGGPAP

SEQ ID NO: 150 - protein, 6 aa, synthetic construct
PAPGGG

SEQ ID NO: 151 - protein, 8 aa, synthetic construct
GSSEAAAK

SEQ ID NO: 152 - protein, 8 aa, synthetic construct
EAAAKGSS

SEQ ID NO: 153 - protein, 6 aa, synthetic construct
GSSPAP

SEQ ID NO: 154 - protein, 6 aa, synthetic construct
PAPGSS

SEQ ID NO: 155 - protein, 8 aa, synthetic construct
EAAAKPAP

SEQ ID NO: 156 - protein, 8 aa, synthetic construct
PAPEAAAK

SEQ ID NO: 157 - protein, 9 aa, synthetic construct
GGSGGGGSS

SEQ ID NO: 158 - protein, 9 aa, synthetic construct
GGSGSSGGG

SEQ ID NO: 159 - protein, 9 aa, synthetic construct
GGGGGSGSS

SEQ ID NO: 160 - protein, 9 aa, synthetic construct
GGGGSSGGS

SEQ ID NO: 161 - protein, 9 aa, synthetic construct
GSSGGSGGG

SEQ ID NO: 162 - protein, 9 aa, synthetic construct
GSSGGGGGS

SEQ ID NO: 163 - protein, 11 aa, synthetic construct
GGSGGGEAAAK

SEQ ID NO: 164 - protein, 11 aa, synthetic construct
GGSEAAAKGGG

SEQ ID NO: 165 - protein, 11 aa, synthetic construct
GGGGGSEAAAK

SEQ ID NO: 166 - protein, 11 aa, synthetic construct
GGGEAAAKGGS

SEQ ID NO: 167 - protein, 11 aa, synthetic construct
EAAAKGGSGGG

SEQ ID NO: 168 - protein, 11 aa, synthetic construct
EAAAKGGGGGS

SEQ ID NO: 169 - protein, 9 aa, synthetic construct
GGSGGGPAP

SEQ ID NO: 170 - protein, 9 aa, synthetic construct
GGSPAPGGG

SEQ ID NO: 171 - protein, 9 aa, synthetic construct
GGGGGSPAP

SEQ ID NO: 172 - protein, 9 aa, synthetic construct
GGGPAPGGS

SEQ ID NO: 173 - protein, 9 aa, synthetic construct
PAPGGSGGG

SEQ ID NO: 174 - protein, 9 aa, synthetic construct
PAPGGGGGS

SEQ ID NO: 175 - protein, 11 aa, synthetic construct
GGSGSSEAAAK

SEQ ID NO: 176 - protein, 11 aa, synthetic construct
GGSEAAAKGSS

SEQ ID NO: 177 - protein, 11 aa, synthetic construct
GSSGGSEAAAK

SEQ ID NO: 178 - protein, 11 aa, synthetic construct
GSSEAAAKGGS

SEQ ID NO: 179 - protein, 11 aa, synthetic construct
EAAAKGGSGSS

SEQ ID NO: 180 - protein, 11 aa, synthetic construct
EAAAKGSSGGS

SEQ ID NO: 181 - protein, 9 aa, synthetic construct
GGSGSSPAP

SEQ ID NO: 182 - protein, 9 aa, synthetic construct
GGSPAPGSS

SEQ ID NO: 183 - protein, 9 aa, synthetic construct
GSSGGSPAP

SEQ ID NO: 184 - protein, 9 aa, synthetic construct
GSSPAPGGS

SEQ ID NO: 185 - protein, 9 aa, synthetic construct
PAPGGSGSS

SEQ ID NO: 186 - protein, 9 aa, synthetic construct
PAPGSSGGS

SEQ ID NO: 187 - protein, 11 aa, synthetic construct
GGSEAAAKPAP

SEQ ID NO: 188 - protein, 11 aa, synthetic construct
GGSPAPEAAAK

SEQ ID NO: 189 - protein, 11 aa, synthetic construct
EAAAKGGSPAP

SEQ ID NO: 190 - protein, 11 aa, synthetic construct
EAAAKPAPGGS

SEQ ID NO: 191 - protein, 11 aa, synthetic construct
PAPGGSEAAAK

SEQ ID NO: 192 - protein, 11 aa, synthetic construct
PAPEAAAKGGS

SEQ ID NO: 193 - protein, 11 aa, synthetic construct
GGGGSSEAAAK

SEQ ID NO: 194 - protein, 11 aa, synthetic construct
GGGEAAAKGSS

SEQ ID NO: 195 - protein, 11 aa, synthetic construct
GSSGGGEAAAK

SEQ ID NO: 196 - protein, 11 aa, synthetic construct
GSSEAAAKGGG

SEQ ID NO: 197 - protein, 11 aa, synthetic construct
EAAAKGGGGSS

SEQ ID NO: 198 - protein, 11 aa, synthetic construct
EAAAKGSSGGG

SEQ ID NO: 199 - protein, 9 aa, synthetic construct
GGGGSSPAP

SEQ ID NO: 200 - protein, 9 aa, synthetic construct
GGGPAPGSS

SEQ ID NO: 201 - protein, 9 aa, synthetic construct
GSSGGGPAP

SEQ ID NO: 202 - protein, 9 aa, synthetic construct
GSSPAPGGG

SEQ ID NO: 203 - protein, 9 aa, synthetic construct
PAPGGGGSS

SEQ ID NO: 204 - protein, 9 aa, synthetic construct
PAPGSSGGG

SEQ ID NO: 205 - protein, 11 aa, synthetic construct
GGGEAAAKPAP

SEQ ID NO: 206 - protein, 11 aa, synthetic construct
GGGPAPEAAAK

SEQ ID NO: 207 - protein, 11 aa, synthetic construct
EAAAKGGGPAP

SEQ ID NO: 208 - protein, 11 aa, synthetic construct
EAAAKPAPGGG

SEQ ID NO: 209 - protein, 11 aa, synthetic construct
PAPGGGEAAAK

SEQ ID NO: 210 - protein, 11 aa, synthetic construct
PAPEAAAKGGG

SEQ ID NO: 211 - protein, 11 aa, synthetic construct
GSSEAAAKPAP

SEQ ID NO: 212 - protein, 11 aa, synthetic construct
GSSPAPEAAAK

SEQ ID NO: 213 - protein, 11 aa, synthetic construct
EAAAKGSSPAP

SEQ ID NO: 214 - protein, 11 aa, synthetic construct
EAAAKPAPGSS

SEQ ID NO: 215 - protein, 11 aa, synthetic construct
PAPGSSEAAAK

SEQ ID NO: 216 - protein, 11 aa, synthetic construct
PAPEAAAKGSS

SEQ ID NO: 217 - protein, 46 aa, synthetic construct
AEAAAKEAAAKEAAAKEAAAKALEAEAAAKEAAAKEAAAKEAAAKA

SEQ ID NO: 218 - protein, 15 aa, synthetic construct
GGGGSEAAAKGGGGS

SEQ ID NO: 219 - protein, 15 aa, synthetic construct
EAAAKGGGGSEAAAK

SEQ ID NO: 220 - protein, 16 aa, synthetic construct
SGSETPGTSESATPES

SEQ ID NO: 221 - protein, 12 aa, synthetic construct
GSAGSAAGSGEF

SEQ ID NO: 222 - protein, 33 aa, synthetic construct
SGGSSGGSSGSETPGTSESATPESSGGSSGGSS

SEQ ID NO: 223 - protein, 30 aa, synthetic construct
AHFKISGEKRPSTDPGKKAKNPKKKKKKDP

SEQ ID NO: 224 - protein, 12 aa, synthetic construct
AHRAKKMSKTHA

SEQ ID NO: 225 - protein, 14 aa, synthetic construct
ASPEYVNLPINGNG

SEQ ID NO: 226 - protein, 7 aa, synthetic construct
CTKRPRW

SEQ ID NO: 227 - protein, 16 aa, synthetic construct
DKAKRVSRNKSEKKRR

SEQ ID NO: 228 - protein, 15 aa, synthetic construct
EELRLKEELLKGIYA

SEQ ID NO: 229 - protein, 16 aa, synthetic construct
EEQLRRRKNSRLNNTG

SEQ ID NO: 230 - protein, 24 aa, synthetic construct
EVLKVIRTGKRKKKAWKRMVTKVC

SEQ ID NO: 231 - protein, 15 aa, synthetic construct
HHHHHHHHHHHHQPH

SEQ ID NO: 232 - protein, 17 aa, synthetic construct
HKKKHPDASVNFSEFSK

SEQ ID NO: 233 - protein, 6 aa, synthetic construct
HKRTKK

SEQ ID NO: 234 - protein, 29 aa, synthetic construct
IINGRKLKLKKSRRRSSQTSNNSFTSRRS

SEQ ID NO: 235 - protein, 8 aa, synthetic construct
KAEQERRK

SEQ ID NO: 236 - protein, 18 aa, synthetic construct
KEKRKRREELFIEQKKRK

SEQ ID NO: 237 - protein, 14 aa, synthetic construct
KKGKDEWFSRGKKP

SEQ ID NO: 238 - protein, 12 aa, synthetic construct
KKGPSVQKRKKT

SEQ ID NO: 239 - protein, 16 aa, synthetic construct
KKKTVINDLLHYKKEK

SEQ ID NO: 240 - protein, 17 aa, synthetic construct
KKNGGKGKNKPSAKIKK

SEQ ID NO: 241 - protein, 13 aa, synthetic construct
KKPKWDDFKKKKK

SEQ ID NO: 242 - protein, 6 aa, synthetic construct
KKRKKD

SEQ ID NO: 243 - protein, 9 aa, synthetic construct
KKRRKRRRK

SEQ ID NO: 244 - protein, 9 aa, synthetic construct
KKRRRRARK

SEQ ID NO: 245 - protein, 7 aa, synthetic construct
KKSKRGR

SEQ ID NO: 246 - protein, 8 aa, synthetic construct
KKSRKRGS

SEQ ID NO: 247 - protein, 17 aa, synthetic construct
KKSTALSRELGKIMRRR

SEQ ID NO: 248 - protein, 17 aa, synthetic construct
KKSYQDPEIIAHSRPRK

SEQ ID NO: 249 - protein, 17 aa, synthetic construct
KKTGKNRKLKSKRVKTR

SEQ ID NO: 250 - protein, 17 aa, synthetic construct
KKVSIAGQSGKLWRWKR

SEQ ID NO: 251 - protein, 20 aa, synthetic construct
KKYENVVIKRSPRKRGRPRK

SEQ ID NO: 252 - protein, 6 aa, synthetic construct
KNKKRK

SEQ ID NO: 253 - protein, 6 aa, synthetic construct
KPKKKR

SEQ ID NO: 254 - protein, 19 aa, synthetic construct
KRAMKDDSHGNSTSPKRRK

SEQ ID NO: 255 - protein, 17 aa, synthetic construct
KRANSNLVAAYEKAKKK

SEQ ID NO: 256 - protein, 22 aa, synthetic construct
KRASEDTTSGSPPKKSSAGPKR

SEQ ID NO: 257 - protein, 16 aa, synthetic construct
KRFKRRWMVRKMKTKK

SEQ ID NO: 258 - protein, 16 aa, synthetic construct
KRGLNSSFETSPKKVK

SEQ ID NO: 259 - protein, 20 aa, synthetic construct
KRGNSSIGPNDLSKRKQRKK

SEQ ID NO: 260 - protein, 23 aa, synthetic construct
KRIHSVSLSQSQIDPSKKVKRAK

SEQ ID NO: 261 - protein, 15 aa, synthetic construct
KRKGKLKNKGSKRKK

SEQ ID NO: 262 - protein, 13 aa, synthetic construct
KRRRRRRREKRKR

SEQ ID NO: 263 - protein, 18 aa, synthetic construct
KRSNDRTYSPEEEKQRRA

SEQ ID NO: 264 - protein, 21 aa, synthetic construct
KRTVATNGDASGAHRAKKMSK

SEQ ID NO: 265 - protein, 20 aa, synthetic construct
KRVYNKGEDEQEHLPKGKKR

SEQ ID NO: 266 - protein, 18 aa, synthetic construct
KSGKAPRRRAVSMDNSNK

SEQ ID NO: 267 - protein, 19 aa, synthetic construct
KVNFLDMSLDDIIIYKELE

SEQ ID NO: 268 - protein, 15 aa, synthetic construct
KVQHRIAKKTTRRRR

SEQ ID NO: 269 - protein, 8 aa, synthetic construct
LSPSLSPL

SEQ ID NO: 270 - protein, 30 aa, synthetic construct; identical to SEQ ID NO: 9

SEQ ID NO: 271 - protein, 52 aa, synthetic construct
MPQNEYIELHRKRYGYRLDYHEKKRKKESREAHERSKKAKKMIGLKAKLYHK

SEQ ID NO: 272 - protein, 10 aa, synthetic construct
MVQLRPRASR

SEQ ID NO: 273 - protein, 24 aa, synthetic construct
NNKLLAKRRKGGASPKDDPMDDIK

SEQ ID NO: 274 - protein, 20 aa, synthetic construct
NYKRPMDGTYGPPAKRHEGE

SEQ ID NO: 275 - protein, 19 aa, synthetic construct
PDTKRAKLDSSETTMVKKK

SEQ ID NO: 276 - protein, 7 aa, synthetic construct
PEKRTKI

SEQ ID NO: 277 - protein, 8 aa, synthetic construct
PGGRGKKK

SEQ ID NO: 278 - protein, 18 aa, synthetic construct
PGKMDKGEHRQERRDRPY

SEQ ID NO: 279 - protein, 11 aa, synthetic construct
PKKGDKYDKTD

SEQ ID NO: 280 - protein, 7 aa, synthetic construct
PKKKSRK

SEQ ID NO: 281 - protein, 7 aa, synthetic construct
PKKNKPE

SEQ ID NO: 282 - protein, 7 aa, synthetic construct
PKKRAKV

SEQ ID NO: 283 - protein, 9 aa, synthetic construct
PKPKKLKVE

SEQ ID NO: 284 - protein, 7 aa, synthetic construct
PKRGRGR

SEQ ID NO: 285 - protein, 9 aa, synthetic construct
PKRRLVDDA

SEQ ID NO: 286 - protein, 7 aa, synthetic construct
PKRRRTY

SEQ ID NO: 287 - protein, 6 aa, synthetic construct
PLFKRR

SEQ ID NO: 288 - protein, 7 aa, synthetic construct
PLRKAKR

SEQ ID NO: 289 - protein, 9 aa, synthetic construct
PPAKRKCIF

SEQ ID NO: 290 - protein, 8 aa, synthetic construct
PPARRRRL

SEQ ID NO: 291 - protein, 8 aa, synthetic construct
PPKKKRKV

SEQ ID NO: 292 - protein, 10 aa, synthetic construct
PPNKRMKVKH

SEQ ID NO: 293 - protein, 13 aa, synthetic construct
PPRIYPQLPSAPT

SEQ ID NO: 294 - protein, 13 aa, synthetic construct
PQRSPFPKSSVKR

SEQ ID NO: 295 - protein, 8 aa, synthetic construct
PRPRKVPR

SEQ ID NO: 296 - protein, 9 aa, synthetic construct
PRRRVQRKR

SEQ ID NO: 297 - protein, 7 aa, synthetic construct
PRRVRLK

SEQ ID NO: 298 - protein, 7 aa, synthetic construct
PSRKRPR

SEQ ID NO: 299 - protein, 8 aa, synthetic construct
PSSKKRKV

SEQ ID NO: 300 - protein, 7 aa, synthetic construct
PTKKRVK

SEQ ID NO: 301 - protein, 9 aa, synthetic construct
QRPGPYDRP

SEQ ID NO: 302 - protein, 18 aa, synthetic construct
RGKGGKGLGKGGAKRHRK

SEQ ID NO: 303 - protein, 24 aa, synthetic construct
RKAGKGGGGHKTTKKRSAKDEKVP

SEQ ID NO: 304 - protein, 9 aa, synthetic construct
RKIKLKRAK

SEQ ID NO: 305 - protein, 9 aa, synthetic construct
RKIKRKRAK

SEQ ID NO: 306 - protein, 17 aa, synthetic construct
RKKEAPGPREELRSRGR

SEQ ID NO: 307 - protein, 7 aa, synthetic construct
RKKRKGK

SEQ ID NO: 308 - protein, 9 aa, synthetic construct
RKKRRQRRR

SEQ ID NO: 309 - protein, 25 aa, synthetic construct
RKKSIPLSIKNLKRKHKRKKNKITR

SEQ ID NO: 310 - protein, 20 aa, synthetic construct
RKLVKPKNTKMKTKLRTNPY

SEQ ID NO: 311 - protein, 16 aa, synthetic construct
RKRLILSDKGQLDWKK

SEQ ID NO: 312 - protein, 7 aa, synthetic construct
RKRLKSK

SEQ ID NO: 313 - protein, 9 aa, synthetic construct
RKRRVRDNM

SEQ ID NO: 314 - protein, 22 aa, synthetic construct
RKRSPKDKKEKDLDGAGKRRKT

SEQ ID NO: 315 - protein, 22 aa, synthetic construct
RKRTPRVDGQTGENDMNKRRRK

SEQ ID NO: 316 - protein, 10 aa, synthetic construct
RLPVRRRRRR

SEQ ID NO: 317 - protein, 10 aa, synthetic construct
RLRFRKPKSK

SEQ ID NO: 318 - protein, 6 aa, synthetic construct
RQQRKR

SEQ ID NO: 319 - protein, 16 aa, synthetic construct
RRDLNSSFETSPKKVK

SEQ ID NO: 320 - protein, 8 aa, synthetic construct
RRDRAKLR

SEQ ID NO: 321 - protein, 8 aa, synthetic construct
RRGDGRRR

SEQ ID NO: 322 - protein, 11 aa, synthetic construct
RRGRKRKAEKQ

SEQ ID NO: 323 - protein, 6 aa, synthetic construct
RRKKRR

SEQ ID NO: 324 - protein, 19 aa, synthetic construct
RRKRSKSEDMDSVESKRRR

SEQ ID NO: 325 - protein, 6 aa, synthetic construct
RRKRSR

SEQ ID NO: 326 - protein, 14 aa, synthetic construct
RRPKGKTLQKRKPK

SEQ ID NO: 327 - protein, 18 aa, synthetic construct
RRRGFERFGPDNMGRKRK

SEQ ID NO: 328 - protein, 15 aa, synthetic construct
RRRGKNKVAAQNCRK

SEQ ID NO: 329 - protein, 6 aa, synthetic construct
RRRKRR

SEQ ID NO: 330 - protein, 14 aa, synthetic construct
RRRQKQKGGASRRR

SEQ ID NO: 331 - protein, 13 aa, synthetic construct
RRRREGPRARRRR

SEQ ID NO: 332 - protein, 61 aa, synthetic construct
RRTIRLKLVYDKCDRSCKIQKKNRNKCQYCRFHKCLSVGMSHNAIRFGRMPRSEKAKLKAE

SEQ ID NO: 333 - protein, 17 aa, synthetic construct
RRVPQRKEVSRCRKCRK

SEQ ID NO: 334 - protein, 32 aa, synthetic construct
RVGGRRQAVECIEDLLNEPGQPLDLSCKRPRP

SEQ ID NO: 335 - protein, 9 aa, synthetic construct
RVVKLRIAP

SEQ ID NO: 336 - protein, 6 aa, synthetic construct
RVVRRR

SEQ ID NO: 337 - protein, 12 aa, synthetic construct
SKRKTKISRKTR

SEQ ID NO: 338 - protein, 16 aa, synthetic construct
SYVKTVPNRTRTYIKL

SEQ ID NO: 339 - protein, 12 aa, synthetic construct
TGKNEAKKRKIA

SEQ ID NO: 340 - protein, 30 aa, synthetic construct
TLSPASSPSSVSCPVIPASTDESPGSALNI

SEQ ID NO: 341 - protein, 12 aa, synthetic construct
VSKKQRTGKKIH

SEQ ID NO: 342 - protein, 9 aa, synthetic construct
SPKKKRKVE

SEQ ID NO: 343 - protein, 19 aa, synthetic construct
KRTADGSEFESPKKKRKVE

SEQ ID NO: 344 - protein, 9 aa, synthetic construct
PAAKRVKLD

SEQ ID NO: 345 - protein, 7 aa, synthetic construct
PKKKRKV

SEQ ID NO: 346 - protein, 30 aa, synthetic construct; identical to SEQ ID NO: 9

SEQ ID NO: 347 - protein, 11 aa, synthetic construct
SPKKKRKVEAS

SEQ ID NO: 348 - protein, 16 aa, synthetic construct
MAPKKKRKVGIHRGVP

SEQ ID NO: 349 - protein, 29 aa, synthetic construct
KRTADGSEFEKRTADGSEFESPKKKAKVE

SEQ ID NO: 350 - protein, 10 aa, synthetic construct
KRTADGSEFE

SEQ ID NO: 351 - protein, 19 aa, synthetic construct
KRTADGSEFESPKKKAKVE

SEQ ID NO: 352-399 - skipped (48 entries)

SEQ ID NO: 400 - protein, 965 aa, synthetic construct
MCFLIPVVTNTRKTREVRCRRNPHNLRSIHVSTISQLSLSVGLWNCQSAVNKADFITSIATYSDYNLMALTETWLRPEDTATHATLSANFSFSHTPRQTGRGGGTGLLISKEWKFTLIPSLPTISSFEFHAVTIIHPFYINVVVIYRPPGKLGHFLDELDVLLSSFSNFATPLLVLGDFNIYVDKPQAADFQTLLASFDLKRAPTSATHKSGNQLDLIYTRHCFTDQTIVTPLQISDHFLLSLNIHITPEPPHTPTLVTFRRNLRSLSPNRLSTIVSDSLPPSRKLTALDSNSATNTLCSTLASCLDRLCPLASRPARASPPAPWLSDALREHRSKLRAAERIWRKTKNPAHLLTYQTLLSSFSAEVTSAKQTYYRLKINNATNPRLLFKTFSSLLYPPPPPASSTLTTDDFATFFCTKTAKISAQFAAPTTNTQDTTPTPHTLTSFSQLSESEVSKLVLSSHATTCPLDPIPSHLLQAISPAVIPTLTHIINTSLDSGLFPTTFKQARVTPLLKKPNLDHTLLENYRPVSLLPFMAKILEKVVFNQVLDFLTQNNLMDNKQSGFKKGHSTETALLSVVEDLRLAKADSKSSVLILLDLSAAFDTVNHQILLSTLESLGVAGTVIQWFRSYLSDRSFRVSWRGEVSNLQHLNTGVPQGSVLGPLLFSIYTSSLGPVIQRHGFSYHCYADDTQLYLSFHPDDPSVPARISACLLDISHWMKDHHLQLNLAKTEMLVVSANPTLHHNFSIQMDGATITASKMVKSLGVTIDDQLNFSDHISRTARSCRFALYNIRKIRPFLSEHAAQLLVQALVLSKLDYCNSLLAGLPANSIKPLQLLQNAAARVVFNEPKRAHVTPLLVRLHWLPVAARIKFKTLMFAYKVTSGLAPSYLHSLLQIYVPSRNLRSVNERRLVVPSQRGKKSLSRTLTLNLPSWWNELPNCIRTAESLAIFKKRLKTQLFSLHFTS

SEQ ID NO: 401 - protein, 965 aa, synthetic construct
MCFLIPVVTNTRKTREVRCRRNPHNLRSIHVSTISQLSLSVGLWNCQSAVNKADFITSIATYSDYNLMALTETWLRPEDTATHATLSANFSFSHTPRQTGRGGGTGLLISKEWKFTLIPSLPTISSFEFHAVTIIHPFYINVVVIYRPPGKLGHFLDELDVLLSSFSNFATPLLVLGDFNIYVDKPQAADFQTLLASFDLKRAPTSATHKSGNQLDLIYTRHCFTDQTIVTPLQISDHFLLSLNIHITPEPPHTPTLVTFRRNLRSLSPNRLSTIVSDSLPPSRKLTALDSNSATNTLCSTLASCLDRLCPLASRPARASPPAPWLSDALREHRSKLRAAERIWRKTKNPAHLLTYQTLLSSFSAEVTSAKQTYYRLKINNATNPRLLFKTFSSLLYPPPPPASSTLTTDDFATFFCTKTAKISAQFAAPTTNTQDTTPTPHTLTSFSQLSESEVSKLVLSSHATTCPLDPIPSHLLQAISPAVIPTLTHIINTSLDSGLFPTTFKQARVTPLLKKPNLDHTLLENYRPVSLLPFMAKILEKVVFNQVLDFLTQNNLMDNKQSGFKKGHSTETALLSVVEDLRLAKADSKSSVLILLDLSAAFDTVNHQILLSTLESLGVAGTVIQWFRSYLSDRSFRVSWRGEVSNLQHLNTGVPQGSVLGPLLFSIYTSSLGPVIQRHGFSYHCYADDTQLYLSFHPDDPSVPARISACLLDISHWMKDHHLQLNLAKTEMLVVSANPTLHHNFSIQMDGATITASKMVKSLGVTIDDQLNFSDHISRTARSCRFALYNIRKIRPFLSEHAAQLLVQALVLSKLDYCNSLLAGLPANSIKPLQLLQNAAARVVFNEPKRAHVTPLLVRLHWLPVAARIKFKALMFAYKVTSGLAPSYLLSLLQIYVPSRNLRSVNERRLVVPSQRGKKSLSRTLTLNLPSWWNELPNCIRTAESLAIFKKRLKTQLFSLHFTS

SEQ ID NO: 402 - protein, 1110 aa, synthetic construct
MDSTAHPNQGRGLEKVSQTLPALQTPGQHTAAGGSSPLSGRNQRKNTKKLLLGAWNIRTLLDRENTPRPERRTALIGKELARYNIDIAALSETRLPEEGSLSEPTTGYTFFWKGRASNEDRIHGVGLAIKTSLLKQLPDLPVGISERLMKIRLPLSKDRYATIISAYAPTLTSTEETIEQFYSDLSAVLHSVPTNDKLILLGDFNARVGQDHERWKGVLGKHGVGKMNNNGLLLLSKCSEFELTITNTVFRMANKYKTTWMHPRSKQWHLIDYIIVRRRDIQDVKITRAMRGAECWTDHRLVRATLQMRIAPRHPKRAQTVRAFYNVSRLRDPSYLQTFQSCLDDKLSAKGPLTGSSTEKWNQFRDAVKETSKAVLGPKQRNHQDWFDENNTAIEDLLSKKNKAFMEWQNNPNSAPKKDRFKSLQATAQREIRKMQDRWWEKKAEEIQRFADMKNYKQFFSALKTVYGPLKPTTTPLLSSDGDTLIKDKKGISNRWKEHFSQLLNRPSSVDQSALDQIPQNRTIEQLDVPPSIEEVQKAIKQMSAGKAPGKDGIPTEVYKALNGKALQAFHIVLTSIWEEEDMPPELRDASIVALYKNKGSRAACDNYRGISLLSTAGKILARVILNRLLSSVSEQNLPESQCGFRPDRSTIDMVFTVRQMQEKCLEQNLSLYIVFIDLTKAFDTVNRDALWVILSKLGCPAKFVKLIQLFHVDMTGEVLSGGETSDRFNISNGVKQGCVLAPVLFNLFFTQVLRHAVMDLDLGVYIKYRLDGSLFDLRRLTAKTKTTERLILEALFADDCALMAHQENHLQTIVDRFSTATKLFGLTISLSKTEVLFQPAPGRPTNQPCITIDGTQLSNVNTFKYLGSTIANDGSLDHEINARIQKASQALGRLRCKVLQHRGVSTATKLKVYNAVVLSSLLYGCETWTLYRKHMKQLEQFHQRSLRSIMRIRWQDRITNQEVLDRANSTSIEVMVLKTQLRWSGHVIRMDPQRIPRQVFYGELSAGLRKQGRPKKRFKDQLKSNLKWAGITPKQLELAASDRSSWRTHINHAATTFEDERRRRLAAARERRHQATTAPPVTTGVPCPMCHKLCASAFGLQSHMRVHRR

SEQ ID NO: 403 - protein, 1110 aa, synthetic construct
MDSTAHPNQGRGLEKVSQTLPALQTPGQHTAAGGSSPLSGRNQRKNTKKLLLGAWNIRTLLDRENTPRPERRTALIGKELARYNIDIAALSETRLPEEGSLSEPTTGYTFFWKGRASNEDRIHGVGLAIKTSLLKQLPDLPVGISERLMKIRLPLSKDRYATIISAYAPTLTSTEETIEQFYSDLSAVLHSVPTNDKLILLGDFNARVGQDHERWKGVLGKHGVGKMNNNGLLLLSKCSEFELTITNTVFRMANKYKTTWMHPRSKQWHLIDYIIVRRRDIQDVKITRAMRGAECWTDHRLVRATLQMRIAPRHPKRAQTVRAFYNVSRLRDPSYLQTFQSCLDNKLSAKGPLTGSSTEKWNQFRDAVKETSKAVLGPKQRNHQDWFDENNTAIEDLLSKKNKAFMEWQNNPNSAPKKDRFKSLQATAQREIRKMQDRWWEKKAEEIQRFADMKNYKQFFSALKTVYGPLKPTTTPLLSSDGDTLIKDKKGISNRWKEHFSQLLNRPSSVDQSALDQIPQNRSIEQLDVPPSIEEVQKAIKQMSAGKAPGKDGIPTEVYKALNGKALQAFHIVLTSIWEEEDMPPELRDASIVALYKNKGSRAACDNYRGISLLSTAGKILARVILNRLLSSVSEQNLPESQCGFRPDRSTIDMVFTVRQMQEKCLEQNLSLYIVFIDLTKAFDTVNRDALWVILSKLGCPAKFVKLIQLFHVDMTGEVLSGGETSDRFNISNGVKQGCVLAPVLFNLFFTQVLRHAVMDLDLGVYIKYRLDGSLFDLRRLTAKTKTTERLILEALFADDCALMAHQENHLQTIVDRFSTATKLFGLTISLSKTEVLFQPAPGRPTNQPCITIDGTQLSNVNTFKYLGSTIANDGSLDHEINARIQKASQALGRLRCKVLQHRGVSTATKLKVYNAVVLSSLLYGCETWTLYRKHMKQLEQFHQRSLRSIMRIRWQDRITNQEVLDRANSTSIEVMVLKTQLRWSGHVIRMDPQRIPRQVFYGELSAGLRKQGRPKKRFKDQLKSNLKWAGITPKQLELAASDRSSWRTHINHAATTFEDERRRRLAAARERRHQATTAPPVTTGVPCPMCHKLCASAFGLQSHMRVHRR

SEQ ID NO: 404 - protein, 982 aa, synthetic construct
MDEYQRSLSRPLLTIMSINIEGLSLAKEELLAKMSEDISCDILCIQETHRDITMRRPKILGMQLAVERPHRQYGSAIFVRSGVAISATSLTEVNNIEILSVELDSCTVSSLYKPPGADFYFTPPTSCHNHEAHFVVGDFNSHSCVWGYDEDDRNGEAVLTWADNSRMSLLHDSKLPPSFNSGRWKRGYNPDLIFVKESISHQCTKRVLNPIPNTQHRPICCVAYAAVRPKSVPFRRRYNFNKANWTKFTETLEAAISDIEPSIENYDLFVEAVKRSSRLSIPRGCRTSYLPGLNEESLNQLQEYLRLFQENPYSDGTIAAGQKLSTALANAKKDRWIELLENLDMSKSSRKAWQLLRRLDSDPLVNPGHANVTPDQIAHQLIQNGKTNCSRIKMKINRVPELETHQLSSPLNLKELREAIKRCKTGKAPGLDDLMMEQIKHLGPKAENWLLKFYNQCLAHKQIPRAWRKTKIIAILKPGKDASNARNYRPISLLCHLYKVYERMLLNRLGPVIEPKLIAQQAGFRPGKNCTGQILHLTEHIEEGYEKGCITGTVFVDLTAAYDTVQHRKMLHKVYHITRDFDFTKTVQTLLENRSFYVEFQGQKSRWRRQKNGLPQGSVLAPTLFNIFTNDQPQPPLTKSFIYADDLGLTTQAKDFETVEKQLTNALKDLSSYYKENHLKPNPAKTQVCAFHLRNREANRKLKVTWEGQELEHCFHPKYLGVTLDRTLTYRKHCMNTKHKVAARNNILRKLTGSAWGADPQVIRTSALALSFSTAEYACPVWHKSAHAKQVDIALNETCRIITGCLKPTPVDKLYKLAGIAPPDVRREVAANGERKKVEHCESHPLHDYHPPPTRLKSRKGFMRTTTPLDVPPATARVSLWAAKPGNSNWMAPQEGLPPGANQEWATWKSLNRLRSGVGRSKDNLARWHYLEESSTLCDCGAEQTTQHMYACPQCPASCTEEELFKATDNAVAVARFWSKTI

SEQ ID NO: 405 - protein, 982 aa, synthetic construct
MDEYQRSLSRPLLTIMSINIEGLSLAKEELLAKMSEDISCDILCIQETHRDITMRRPKILGMQLAVERPHRQYGSAIFVRSGVAISATSLTEVNNIEILSVELDSCTVSSLYKPPGADFYFTPPTSCHNHEAHFVVGDFNSHSCVWGYDEDDRNGEAVLTWADNSRMSLLHDSKLPPSFNSGRWKRGYNPDLIFVKESISHQCTKRVLNPIPNTQHRPICCVAYAAVRPKSVPFRRRYNFNKANWTKFTETLEAAISDIEPSIENYDLFVEAVKRSSRLSIPRGCRTSYLPGLNEESLNQLQEYLRLFQENPYSDGTIAAGQKLSTALANAKKDRWIELLENLDMSKSSRKAWQLLRRLDSDPLVNPGHANVTPDQIAHQLIQNGKTNCSRIKMKINRVPELETHQLSSPLNLKELREAIKRCKTGKAPGLDDLMMEQIKHLGAKAENWLLKFYNQCLAHKQIPRAWRKTKIIAILKPGKDASNARNYRPISLLCHLYKVYERMLLNRLGPVIEPKLIAQQAGFRPGKNCTGQILHLTEHIEEGYEKGCITGTVFVDLTAAYDTVQHRKMLHKVYHITRDFDFTKTVQTLLENRSFYVEFQGQKSRWRRQKNGLPQGSVLAPTLFNIFTNDQPQPPLTKSFIYADDLGLTTQAKDFETVEKQLTNALKDLSSYYKENHLKPNPAKTQVCAFHLRNREANRKLKVTWEGQELEHCFHPKYLGVTLDRTLTYRKHCMNTKHKVAARNNILRKLTGSAWGADPQVIRTSALALSFSTAEYACPVWHKSAHAKQVDIALNETCRIITGCLKPTPVDKLYKLAGIAPPDVRREVAANGERKKVEHCESHPLHGYHPPPTRLKSRKGFMRTTTPLDVPPAAARVSLWAAKPGNSNWMAPQEGLPPGANQEWATWKSLNRLRSGVGRSKDNLARWHYLEESSTLCDCGAEQTTQHMYACPQCPASCTEEELFKATDNAVAVARFWSKTI

SEQ ID NO: 406 - protein, 979 aa, synthetic construct
MLYTIFLVYGILCFFFVYFCIYLYITVYLCFLFFLFLLLCGDVESNPGPGRARGCRLLYCNIRGLHANLAELDFVSRGVDVVCCSETLVAGRRHDAELALAGFQSPFRRLCGSGPGFRGMAVYVRSGFCAYRQSVHECACHEIIVVRVCGRLNNYYLFSLYRSPATDDSLYDCLLTAMASIQSTDPKAAFVFVGDVNAHHRDWLGSASPTDCHGVAALDFCTLSSCVQLVRGSTHIAGNCLDLVMTDVPDLMTVTVGSPIGSSDHSHLVVSLDLNQVVPVVDTRRVVFVKSRANWVAITRAVRTLPWRQIIHSEDPVSELNDLTVSILERFVPKRTILVRSRDKPWFDDQCRLAFEAKQAAYRAWRRSRDRTLWQTYVDRRAEAKRVYEEAQRRLRQRSRESLLSIDHPHRWWSELKGSVFGAEPSLPPLVGPGGGIITDPLARAELLSAHFDGKQSRDVIALPHGCHPEPRLTSLAFRSGAIKVLLEGLDPYGGVDPVGMFPLFYKQLADVLAPKLAVIFRRLIRLGNFPRCWRTGNITPIPKGPVSPYVANYRPITLTPILSKVFEKLIAGKLGRFAEVTGLLPAGQFAYRIGLGCCDALLSVSHHLQSALDCRSEARLVQLDFSAAFDRVNHRGLLYKLESFGVGGRVLSIIRDFVSERTQSVSVDGVLSASVGVVSGVPQGSVLGPLLFVLYTSDMFSSLENTLINYADDSTLMAVIPAPRLRDAVAQSLNRDLSRISAWCSAWSMKLNASKTKSMIISRSRTLVPQHPQLEIDDTLLQESSSLEILGVVFDEKLTFEPHIRRLVSRASTKIGLLRKVNSVFGDSQVARRCFYAFLLPVLEYCSPVWASAADTHLRLLDRLVSSASRLCADNDLVNLSHRRRVAELCMFYKVYNNERHWLYSSLPALKVFGRETRAACGAHSFTLEAVRCRTNQFCRCFVPWSAKVWNLLPASAFGRIGLQAFKSAVNGFLLDFL

SEQ ID NO: 407 - protein, 1037 aa, synthetic construct
MWEKATSNVHLQSGTWITQNAYSVKINPGLSGVRLIGRSTTCTERTERTLNLLVCATLLLAGDVSPNPGPDTGGLPVWRKGIVYAFYNVVSLPRHLDEIQQLLLRNTRIHVLGLNETRLSDSIPDSSVDINGYTLYRTDRDRQGGGVGVYVKQTIASQRRCELEQEDLEVCCVEIKPEKARKTLLTCVYRPPTSGPDWRNSAESLVHKLNQTAEKENADVAIMGDFNSDLLTSTQAMSSVEFLMGLYQLVPVIREPTRITEKTESCIDNIFVSNPDRYKSSASVAWGPSDHNLILTCAKAGSEAGAAHRCEYRSYKLYTQQSFIDSLKSVRWDTVFDCTDVSEAWNAFKDIFLNVADEHAPLRTKTARENNRPAPWMTDTVKNMMGRRDAARRKAIRTKDVQDWDTYRSLRNQTTSIIRKEKKSHFATAVSEAKGDQSLMWKIINSFTGKSKSTKRVQKLLRADNTSMSDPGEMAQEFNDYFTSCASRLTDGMPDSEEDPLRHIPDSTTKFSFDCVEETEVLNELQKLKTKKATGLDKIPAKLLKDSAPVVAKPLAHIFNLSLASGEVPSDWKEAQITPVHKSGSCADVGNYRPVSVLSVTSKVMEKLVCNQVTRYLTRCKLLTTHQSGFRRHHSTATAVQKVVEDITSGYNCSKVTVALFLDLRKAFDSVNHEIMLSKLKKFGFDSDAMKWFTSYLSERLQCTCLQGQYSSKTRVSCGVPQGSVLGPLLFCLYVNDLPNVIQKCSIHMYADDTVLYYSAVSVKVCEETVSMDMKRVVKWLSENRLLLHPDKTKSMLFGLPQKLKHAGTTVNITDGVNVYEQVDSFTYLGITLDPALRWAAHVQKITKKLLSGLGAMGRARAFVTNEVLKTMYQTLLLAHLEYCATAWLPSLAQGNKTLMLQLDRLVNRAARLITGHKLRDHVTVDNLRAEAGIDSVRKRTEITTLVTVFKTIRGKAPAYLASLFKWEAPPTMSVRPTRSEVKRLRDYDPHLLWCPPARVIAFRNSLQSYGPFLWNSLPLKQRQLLSLRTFKKFIEN

SEQ ID NO: 408 - protein, 986 aa, synthetic construct
MRRLLLLFLIMCLTPSPVPVRISSRRYYRPRARSALYRNLSSLSYPTRSTHVQHLVTGGLWNCQSATRKADFISGFAIQQSLDFLALTETWITPENTSTPAALSSAFSFSHTPRPTGRGGGTGLLISPKWSFSLYPLPPSTPLSFEFHAVTITHPVQLTIIVLYRPPGSLGHFLEELDILLSNFPENGPPLILLGDFNIQTEKSSDLLHLLSSFALSLSPSPPTHKAGNHLDYIFTRNCSTTNLSVTPLHVSDHFFISYSLPLSITNKPPSLTNSIPARRNIRSLSPSSLASSVLSALPSTDSFSLLHPNAAAETLLSTLSSSLDSLCPLTTRRTGKSPPAPWLSQPVRAMRATMRASERRWRKYKRPDDLLEFQSLLSSFSASISAAKSSFYQSKIESSFSNPKKLFSIFSNLLEPPTPPPPSTLLPGDFVNYFTKKIADIRSSFSNPPPTSRVPPTSPLSPSLSSFTALSPNQILTLVTSARPTTCPLDPIPSHLLQSIAPDLLPFLTCLINNALSSGCFPNSLKEARVNPLLKKPTLNPSEENNYRPVSLLPFLSKTLERAIFNQLSSYLHCNNLLDPHQSGFKAGHSTETALLAVSEQLHTARAASLSSVLILLDLSAAFDTVNHQILISSLQELGVTGSALSLLSSYLDGRTYRVTWRGSVSEPCPLTTGVPQGSVLGPLLFSLYTNSLGAVIRSHGFSYHSYADDTQLILSFPHSDTQVAARISACLTDISQWMSAHHLKINPDKTELLLFPGKDSLTQDLTVNFGNSVLTPTSTAKNLGVTLDSQLSLTPNITATTRSCRYTLYNIRRIRPLLTQKAAQVLIQALVISRLDYCNSLLAGLPATAIRPLQLIQNAAARLVFNLPKFSHTTPLLRSLHWLPVAARIQFKTLVLTYHAVNGSGPAYIQDMVKPYIPTRTLRSASAKLLVPPSLRAKHSTRSRLFAVLAPKWWNELSEDTRTAESLHIFRRKLKTHLFRLYLD

SEQ ID NO: 409 - protein, 1129 aa, synthetic construct
MSGTPRVAFDSGKDLRNPIGQSPPALSRAAPGQLGTDPSRSACFIGCLELRVLLDKWIVCRAPDKQESKEKRRQKTQPIRIGSWNVRTMRTGLSDDLTVIEDIRKTAAIDRELYRLNIDIVALQETRLPDSGSLKEDSYTFFWQGKGMEETREHGVGFAVRNTLLHMIEPPTGGTERIITLRLSTHEGPVNLLCVYAPTLQATSEVKDQFYGQLDSAIKKIPVSEHIFILGDFNARVGTDQESWQTVLGHHGIGKMNENGQRLLELCCYHNLCVTNTFFQNKAIHKASWRHPRSQRWHQLDLVITRRTSLNSVCNTRAYHSADCDTDHSLIAARIKLRPKKLHHMKKKGQPKIDVSKTMLPDRNQKFLECLEGTLNNIQPQDAEHRWETLSKTIYSAAAQSYGKKERKNTDWFEAYISELEPVMDTKRKALVSYKQNPSSQNLQALKAARQEAQRASRRCANNYWLLLSERIQLASATGDIRRMYEGIKQATGKPIKKSAPLKAKSGEIITDKDKQMARWVEHYLDIYSTENSVSQDALDNIEDFSVLAELDADPTIEELSKAIDSMSNGKAPGEDNIPAEIIKSGKSVLLEPLHELLRLCWKEGKVPQSMRNSKIVTLYKNKGDRTDCNSYRGISLLSIVGKVFAKVVLTRLQVLADRVYPESQCGFRAERSTTDMIFSVRQLQEKCREQQRPLYIAFIDLTKAFDLVSRRGLFQLLRKIGCPPQLLDIIISFHEDMKGVVSFDGETSEPFAIRSGVKQGCVLAPTLFGIFFSLLLKSAFGHSTQGVHLHTRSDGKLFNLARLRAKTKVRSVLIRDMLFADDAALVAHVEDELQQLLNQFAHACSEFALTISIKKTVVMGQDVPQPPVVTIGSEVLEVTDHFTYLGSTVTSNLSLDKEIDRRIARAAGVMTKLGTRVWNNSHLTLNTKLEVYRSCVLSTLLYGSETWTTYAKQENRLESFHLRCLRRILGISWRDRVPNTTVLERSCSLSIHLLLCQRRLRWLGHVSRMKDGRIPKDILFGELATGKRPVGRPALRFRDVCKRDLKLTDIDPASWEQIAADRNRWRHTVKDGLAKGQERRTEHLESRRRKRKEKPQQGNPSAFICPNCGRDCHARIGLQSHSRRCQPP

SEQ ID NO: 410 - protein, 965 aa, synthetic construct
MPRKNWNCGRRTGDEKRKMMFGCWNVQGISTKIDLLPAELDMFNIDVVVLSETKRKGKGEEELDNYVHIWSGVSKAVRAKAGVSIMIQKKWKKRITNWTFINERIITVEMTLFAREVVIIGVYAPTNDTKDKEKDAFWDTLRETIEKIPRRKELIIMGDMNGRVGIRESCKIVGKHGEAEYNDNGERLIDICAQFDLKITNTFFKHKDIHKYTWQQNTKELRSIIDYIIIRQTSSFKAADVRSYRGAQCGSDHYLVKMKSFWPWKNATNDTSNINKMNCSEKVQNVHFNIDSLQDESIRTFFKARMERTLDESFEGSTEEIYEYIKTKVKNVASEVLGIKENNPKRAAEWWSEEIETSVKEKRNAFVQWLNDKSEGTRSKYKEKKNEVEKKIRLAKNEAWERTCANVNSKLGFGRAKEAWSVLKALRQDTKGKSNLQLVTQKEWEEYFKKLLNEDRDEYLEEGTVEENEHHDDEILISESEVLQVLRTGKNGKSPGPGNINMEFLKYGGDKIVKLILQLFNKMLHGDSVPKEMKLGYISTIFKKGDRKICSNYRGICVTNTLMRIFGKIIKNKLEKNFRTQQEQCGFTAGRSCVDHIFTLRQILEKHREKSKNVGLIFIDLEKAYDTVPRKLLWRALHRANINTSLIKIIEQMYKDNICQVKIGNTLSQKFRTSKGLLQGCPMSPTLFKIYIDICLRTWSQKCNSMGLEIRDGVYLHHLLFADDQVVIAQDGEDANYMCNQLAIAYKNWGLKINYQKTEYLTNDPHELRIEGKKIKKVNTFCYLGSILETEGKSDSEINKRISSGRKVIGMLNSVLWSRNVMNRTKKIIYKSIFESAVLYGAETWTINQKHTKKLQALEMDFWRRSARISRKEKRRNTEVIKRMEIIERIDEVMDRKKLRWYGHVRRMEDTRIPKLVLEWQPEGRRRRGRPVTTWIKNVQLTMNRLGAEEEDTQDRHTWRNIVNN

SEQ ID NO: 411-419 - skipped (9 entries)

SEQ ID NO: 420 - protein, 982 aa, synthetic construct
MDEYQRSLSRPLLTIMSINIEGLSLAKEELLAKMSEDISCDILCIQETHRDITMRRPKILGMQLAVERPHRQYGSAIFVRSGVAISATSLTEVNNIEILSVELDSCTVSSLYKPPGADFYFTPPTSCHNHEAHFVVGDFNSHSCVWGYDEDDRNGEAVLTWADNSRMSLLHDSKLPPSFNSGRWKRGYNPALIFVKESISHQCTKRVLNPIPNTQHRPICCVAYAAVRPKSVPFRRRYNFNKANWTKFTETLEAAISDIEPSIENYDLFVEAVKRSSRLSIPRGCRTSYLPGLNEESLNQLQEYLRLFQENPYSDGTIAAGQKLSTALANAKKDRWIELLENLDMSKSSRKAWQLLRRLDSDPLVNPGHANVTPDQIAHQLIQNGKTNCSRIKMKINRVPELETHQLSSPLNLKELREAIKRCKTGKAPGLDDLMMEQIKHLGAKAENWLLKFYNQCLAHKQIPRAWRKTKIIAILKPGKDASNARNYRPISLLCHLYKVYERMLLNRLGPVIEPKLIAQQAGFRPGKNCTGQILHLTEHIEEGYEKGCITGTVFVDLTAAYDTVQHRKMLHKVYHITRDFDFTKTVQTLLENRSFYVEFQGQKSRWRRQKNGLPQGSVLAPTLFNIFTNDQPQPPLTKSFIYADDLGLTTQAKDFETVEKQLTNALKDLSSYYKENHLKPNPAKTQVCAFHLRNREANRKLKVTWEGQELEHCFHPKYLGVTLDRTLTYRKHCMNTKHKVAARNNILRKLTGSAWGADPQVIRTSALALSFSTAEYACPVWHKSAHAKQVDIALNETCRIITGCLKPTPVDKLYKLAGIAPPDVRREVAANGERKKVEHCESHPLHGYHPPPTRLKSRKGFMRTTTPLDVPPAAARVSLWAAKPGNSNWMAPQEGLPPGANQEWATWKSLNRLRSGVGRSKDNLARWHYLEESSTLCDCGAEQTTQHMYACPQCPASCTEEELFKATDNAVAVARFWSKTI

SEQ ID NO: 421 - protein, 979 aa, synthetic construct
MLYTIFLVYGILCFFFVYFCIYLYITVYLCFLFFLFLLLCGDVESNPGPGRARGCRLLYCNIRGLHANLAELDFVSRGVDVVCCSETLVAGRRHDAELALAGFQSPFRRLCGSGPGFRGMAVYVRSGFCAYRQSVHECACHEIIVVRVCGRLNNYYLFSLYRSPATDDSLYDCLLTAMASIQSTDPKAAFVFVGDVNAHHRDWLGSASPTDCHGVAALDFCTLSSCVQLVRGSTHIAGNCLDLVMTDVPALMTVTVGSPIGSSDHSHLVVSLDLNQVVPVVDTRRVVFVKSRANWVAITRAVRTLPWRQIIHSEDPVSELNDLTVSILERFVPKRTILVRSRDKPWFDDQCRLAFEAKQAAYRAWRRSRDRTLWQTYVDRRAEAKRVYEEAQRRLRQRSRESLLSIDHPHRWWSELKGSVFGAEPSLPPLVGPGGGIITDPLARAELLSAHFDGKQSRDVIALPHGCHPEPRLTSLAFRSGAIKVLLEGLDPYGGVDPVGMFPLFYKQLADVLAPKLAVIFRRLIRLGNFPRCWRTGNITPIPKGPVSPYVANYRPITLTPILSKVFEKLIAGKLGRFAEVTGLLPAGQFAYRIGLGCCDALLSVSHHLQSALDCRSEARLVQLDFSAAFDRVNHRGLLYKLESFGVGGRVLSIIRDFVSERTQSVSVDGVLSASVGVVSGVPQGSVLGPLLFVLYTSDMFSSLENTLINYADDSTLMAVIPAPRLRDAVAQSLNRDLSRISAWCSAWSMKLNASKTKSMIISRSRTLVPQHPQLEIDDTLLQESSSLEILGVVFDEKLTFEPHIRRLVSRASTKIGLLRKVNSVFGDSQVARRCFYAFLLPVLEYCSPVWASAADTHLRLLDRLVSSASRLCADNDLVNLSHRRRVAELCMFYKVYNNERHWLYSSLPALKVFGRETRAACGAHSFTLEAVRCRTNQFCRCFVPWSAKVWNLLPASAFGRIGLQAFKSAVNGFLLDFL

SEQ ID NO: 422-499 - skipped (78 entries)

SEQ ID NO: 500 - DNA, 100 bp, Homo sapiens
  source 1..100: mol_type = genomic DNA
gtttcgcgtcgtccgcctcagtttcggcccttgttttgactcgggaggcgtgtccaaacgccaggtaaccactatatagtgagcacggtagcattagtcg

SEQ ID NO: 501-699 - skipped (199 entries)

SEQ ID NO: 700 - DNA, 1110 bp, synthetic construct
  source 1..1110: mol_type = other DNA
gcaggagaagcactttagcagcatctagaacagcagcctgtaagtacatttaagatttgtttcagttgttgtgtatggtttgaggacttgtttccagctgtttgtgtaaagttgtaggacatttaaacttgctttcagttgtgtataatactagaagttgtttagccactgtttccttggttactataagagcttgtgtagcgaacgcagacgcggttcgcgtcgtccgcctcagtttcggcccttgttttgactcgggaggcgtgtccaaacgccaggtaaccactatatagtgagcacggtagcattagtcggcaggagaagcactttagcagcatctagaacagcagcctgtaagtacatttaagatttgtttcagttgttgtgtatggtttgaggacttgtttccagctgtttgtgtaaagttgtaggacatttaaacttgctttcagttgtgtataatactagaagttgtttagccactgtttccttggttactataagagcttgtgtagcgaacgcagacgcggttcgcgtcgtccgcctcagtttcggcccttgttttgactcgggaggcgtgtccaaacgccaggtaaccactatatagtgagcacggtagcattagtcggcaggagaagcactttagcagcatctagaacagcagcctgtaagtacatttaagatttgtttcagttgttgtgtatggtttgaggacttgtttccagctgtttgtgtaaagttgtaggacatttaaacttgctttcagttgtgtataatactagaagttgtttagccactgtttccttggttactataagagcttgtgtagcgaacgcagacgcggttcgcgtcgtccgcctcagtttcggcccttgttttgactctcgaggcgtgtccagctgaattcaatcagctagtgctttggggttatataaacaactagttcaccgcggcagcggtcgcggcagcctcgtgtgaagaccgacgagggtaaagaccatcgactctacctgcgcgactccaccgagcaaagacaccgacaaagcacttgagtactttactgtattgttttactttacacttattttttgttgtcagtgcacttttatt

SEQ ID NO: 701 - DNA, 1110 bp, synthetic construct; identical to SEQ ID NO: 700
  source 1..1110: mol_type = other DNA

SEQ ID NO: 702 - DNA, 710 bp, synthetic construct
  source 1..710: mol_type = other DNA
gggtgtatggggtgctcagggaggggtagtatctctggtatggagggcttgtcgtgccctcctagggcagctctccagcctctgacccccacctgacacccagctctcacttgtggctcccagtagctgctagcatgtggcagcggccacaccccgggcaacggcttcgacaggccggctaaaccttgtgagggtagccatcgggtcatcgacccctggtgaaccagggctttgctcacccagcatgtgaagactgcttcggctgaacagacggaagaaaccaataagaaggttcaacggctgagagggcgacgcagcaaagcactgtggagtgcttagggcgtgttggagcacaaaggacaacacggccatccaatgcagctgaggaagtctccagatgtaacaatttttcgtgccactggacccaggcttccaacgccgagagagtgggactgtctctgtgcatcggcttttccacttaaatctctttcacgcacaagtatctttgtgcacactcatctatcctaaccccgtccaccctcttcaagacctgcggcgatgggggagtggcgacgcaacaggtggaggtgaccactggcagttgtagtcacgatcctgcacgtaggcggcccacggaccagtggtcgctcggccctgtgggcagcagggacgttcggcagcatcctgggcgactgagcagccctctctag

SEQ ID NO: 703 - DNA, 710 bp, synthetic construct; identical to SEQ ID NO: 702
  source 1..710: mol_type = other DNA

SEQ ID NO: 704 - DNA, 109 bp, synthetic construct
  source 1..109: mol_type = other DNA
gggggacacggaaagagcctccccgaagattgagtgaattcagtcgggcgtcccctgggcaacgtttcttgtaagcggccgatctttccaccccaaaagcattggatga

SEQ ID NO: 705 - DNA, 109 bp, synthetic construct; identical to SEQ ID NO: 704
  source 1..109: mol_type = other DNA

SEQ ID NO: 706 - DNA, 383 bp, synthetic construct
  source 1..383: mol_type = other DNA
gcgtggcctgcgcgttatcaggccgcccccattgtccggccaccggacgcctctttgtttgtatgagctggctttgggtttggggctctgggtagcccctgagttggaggaaatgccactctaaaggcggatgagacctcttttggtccaacggcatccctgagaggagatgaacaggctggtgccatagctgggtactcagtcttccgcagtctgctcctctctctcttccatcaggtagtaccacctgatgctcttttcctttcctttctcttcttcttcttttcggccaaagcctgtactggtgatggcagggtctggggcgcgtagatagctggccgctttcgtagctatcgttactgtcgatttgtttttgctttatt

SEQ ID NO: 707 - DNA, 13 bp, synthetic construct
  source 1..13: mol_type = other DNA
agccctagtccct

SEQ ID NO: 708 - DNA, 705 bp, synthetic construct
  source 1..705: mol_type = other DNA
cagtgtgcatctcttctacaaggccaccagacatccaggcgacctgaaatcggactaagtatctctttctttaaaccaagctagtctgctaaatttgctgttgattctagtgtcttaagttaatttgattgctgatttgctttagtttttgtcgtctcacggccagttctctttgtttgaagttatcttggttgctagtttgctcaagctctttcagtcttttagtgccagtttgtgttctagattctactattaagttaactgccagtgtgccctcctaactctgctaggttttgacctgatctaagtctgttttgccttgttttctgaagcaaataagacttgtatccttaaactctcattttgtcaaaacaccacatggtgtttgttcactgattagggtgtcaagctattggtgctttgcattttgaggagtttctgtcgaggccaatcgaccttttgtctcctaaacgacgggggagcggccagcgcagccgcagccgacttccactaacgagggagtatttaactagaaatcgtgggaagcgttagcttatcctcgcagcacgaagacgagcagaacaaagaccagggagtctttcgtggagtcaagacgagagacaaagaccagggagtctttcgtggagtcaagacgagcagaacaaagacaagggagtctttcgtggcagtcttcggggcggctga

SEQ ID NO: 709 - DNA, 764 bp, synthetic construct
  source 1..764: mol_type = other DNA
tctgtaaatggctgtgtgatgcgtctagtgtgtaggcgtagcggtagtgtgcttgccacttctcgctttcagccctcaccgctggctagcggagctgcatgcagcactgcgaaaagagagccgagtgcgtaagtctctcctgccagtacatagcctctccacagcaagtccccattgcagtgcctcctcgtggctacagacggaaactgggcaccgtaaggccccaggctaaactgcagggagctcggaggaggtctggcccccagacgcacggcatgcatggcccaccggcgtgtggacacgccctgatgcctgcgaaccagacccccagctatgggcaaatagcacgggtagacggagctcgtcagccttggatggcagttcgtctaggggaaggaaaaccctgattcaaaaacctccgctgccttgcggctatacccagtcctgggaaaggctacgggagttaacccagagagaaaatccggagtggagtacgtgaggcggttggctgtcaaactctgtcatccttccggcaactcctgcagccaaaccaacgccaagtgtcacgcctcgcgttcccttggaccacgtcggtgaggtcgagaggggggtcctgttgtgtttttgggcagcgcaggtcctccataaacctgcccaggctagcgctctggagaggccactccagtcgcccccatcactgggggtgagaaacaaaccgggagacagcagtttacgggttataagtccttgctaaattgacgtaa

SEQ ID NO: 710 - DNA, 268 bp, synthetic construct
  source 1..268: mol_type = other DNA
cccgtgtggagtttgctggtcttccatcgggcacctccccaggtggcggataggggaatgctcaccagatatggtgggtaccggggaaataaaatacccggggtggaccaaaaccagcaactgctgccttgtagtatgatattggcttatcaaaggctaaaggaagaaaaccttgaatacaaattacctggtcctccaggttgggggttgtgcagtgggccagctcctcactcacataaaaatataaaatgctaaaaaacctaataat

SEQ ID NO: 711-799 - skipped (89 entries)

SEQ ID NO: 800 - DNA, 233 bp, synthetic construct
  source 1..233: mol_type = other DNA
taatctgcaattgcctctctgaatatcacactaactgtacccaaaaaaaaaaaaaaaaaaaaaaaaaataaaaawactactaatacttcccttcttagactttacagacctgaaacttgcctatagcacttattcattgttgctcttagttgtgtaaattgcttccttgtcctcatttgtaagtcgctttggataaaagcgtctgctaaatgactaaatgtaaatgtaaatgt

SEQ ID NO: 801 - DNA, 233 bp, synthetic construct; identical to SEQ ID NO: 800
  source 1..233: mol_type = other DNA

SEQ ID NO: 802 - DNA, 51 bp, synthetic construct
  source 1..51: mol_type = other DNA
tgaaactgcacaaagacaatagtcattctcgatcaccgagagactaccact

SEQ ID NO: 803 - DNA, 51 bp, synthetic construct; identical to SEQ ID NO: 802
  source 1..51: mol_type = other DNA

SEQ ID NO: 804 - DNA, 91 bp, synthetic construct
  source 1..91: mol_type = other DNA
tagttgcttgtgatttcttttcttttttattttatttccattatttgaaatgtatttgctgtaccaatgcttttgacacgaaataaataaa

SEQ ID NO: 805 - DNA, 91 bp, synthetic construct; identical to SEQ ID NO: 804
  source 1..91: mol_type = other DNA

SEQ ID NO: 806 - DNA, 99 bp, synthetic construct
  source 1..99: mol_type = other DNA
tagcagcgttttgggcttcccggtgttgcaagatgcttcatttgggttgtattacctgtccgtgggagctcaagcgtgaagttttaataataataataa

SEQ ID NO: 807 - DNA, 171 bp, synthetic construct
  source 1..171: mol_type = other DNA
aacttgatctggctgatgctccgtagtctggactttgatattggataattttattatgtattgtatatgtgctatgtgtactttgtacttttatgtccaggattacctgaaaagcaggccgatttccggcctgagatgtaattactggtaaaataaataaagtgaagtgaa

SEQ ID NO: 808 - DNA, 203 bp, synthetic construct
  source 1..203: mol_type = other DNA
taaagactaacaaattgtagcacttaaattgtacttgtaacgtcactcatctatagcaaattgtaaattggcttatttgaggaaattgcactttcttgtttcttgttctcctgagtttgtaccctatggttgaatgcacttattgtacgtcgctttggataaaagcgtcagctaaatgacatgtaatgtaatgtaatgtaatg

SEQ ID NO: 809 - DNA, 54 bp, synthetic construct
  source 1..54: mol_type = other DNA
tgacctgatacagagcgctaccatcatctggaaagatggaaggatgcctactac

SEQ ID NO: 810 - DNA, 104 bp, synthetic construct
  source 1..104: mol_type = other DNA
tagtgtaaaaccttatgtactaggtgtattcatttctgggcgtattagtatgttggaggtaaacctctgtaatgaggacaatctcaataataaaataaaataaa

SEQ ID NO: 811-899 - skipped (89 entries)

SEQ ID NO: 900 - DNA, 2946 bp, synthetic construct
  source 1..2946: mol_type = other DNA
atggacgagtaccagcgctccttgtcccgccccctgttgacaatcatgagtattaatatcgaaggcttgagcctcgcgaaagaggaactgcttgccaagatgtccgaggacatcagctgcgacattctgtgcatccaagagacccatcgcgacatcaccatgcgtcgccccaagatcctcggtatgcagcttgcggtggagcgccctcaccgccagtacggctccgcgattttcgtgcgttccggtgtggccatttctgctaccagcctcaccgaggttaacaatattgagatcctgtcagtggagctcgattcctgtaccgtctccagtctgtacaaacctcccggtgcagacttctactttactcccccgacgtcttgccacaaccatgaggctcattttgtggttggtgatttcaattcccactcctgcgtgtggggctatgacgaggatgaccgcaacggcgaagctgttctgacctgggccgataattcccgcatgtccctgctccacgatagtaagctgcctccctccttcaacagtgggagatggaagcgcgggtacaaccctgatcttatcttcgtcaaagaatccatctctcatcagtgtaccaagcgcgtcctcaacccgattcctaacactcagcaccgccccatttgttgcgtagcatatgctgccgtgcgtcccaagtctgtccccttcagaaggagatacaacttcaacaaggctaactggaccaagtttaccgaaaccttggaagcggcaatctccgacattgagccatctatcgagaattatgatctcttcgttgaggcagtcaagcggtcctctcgcctgagtatcccccgtggatgtaggacctcctacctgcccggcctgaacgaagagtcactcaatcagctgcaggaatacctgcgcctgttccaagagaatccttactccgatggcaccatcgctgccggacaaaaactgagcaccgctctggcgaatgctaagaaagaccgctggatcgagctgctcgagaacctggacatgtccaagtctagccggaaagcttggcagctcctgcgccggctggacagcgaccccctcgtgaatcctggccatgccaatgtaacgccggaccagatcgcccatcaactgatccagaacggcaagaccaattgcagtagaatcaagatgaagatcaacagagtacccgagttggaaacacaccagctgtctagtcctctcaacctcaaagagctccgcgaagcaatcaaaaggtgtaagacgggcaaagctcccggtctggatgacctgatgatggaacagatcaaacacttgggggccaaggctgagaactggttgctgaaattctacaaccagtgcctggctcacaagcagatcccccgtgcgtggcgcaagactaagattatcgccatcttgaagccgggcaaggatgctagtaacgcccgcaactaccgtcctatttccctcctgtgtcacctttacaaggtgtacgagcgcatgctcctgaaccgcttgggccccgtcatcgagcctaaactgatcgcccaacaggctggtttccgcccaggtaagaactgcactggacagatcctgcaccttacggagcacatcgaggaaggttacgagaagggctgcatcaccggaaccgtcttcgtggacctgactgcggcctacgacacggttcagcacagaaaaatgctccacaaggtatatcatattacccgggatttcgacttcaccaaaacagtgcagacgcttctggagaatcgctccttttacgtcgagttccagggtcagaaaagtcggtggaggcgccagaagaacggcttgccccagggtagcgtgctcgccccaaccctgtttaatatcttcaccaacgaccagccacagcccccgctgacaaaatcctttatctatgccgacgatcttggcctgaccacgcaagccaaggactttgagacagtcgagaaacagctcacaaacgcactcaaggacctgagttcctattacaaggagaaccatctcaaacctaaccccgctaagacacaggtctgcgcttttcacctgaggaatcgggaggccaaccgtaaactgaaggtgacatgggagggacaggaactggagcactgtttccaccccaagtatttgggcgtgactctcgatcgcacccttacgtatcggaagcactgcatgaacactaagcataaggtggcggccagaaataacatcctgcgtaaactcacaggaagcgcctggggcgccgacccacaggtcatccgtaccagtgctctggccctgtctttctccactgctgaatatgcgtgtccggtgtggcacaagtccgcccacgcgaagcaggtggatattgccctgaacgagacatgccggattatcactggttgcctcaagcctacccccgtcgacaagctctataagttggccggcattgcaccccctgatgtccgtcgcgaagtcgcagccaatggcgagcggaaaaaggtagaacactgcgaatcacatccgctgcatggatatcatccccctcccacccggcttaagagccgtaagggcttcatgcgcacaaccactccgctggatgtgcctcccgctgccgcgcgcgtgagtctgtgggccgctaagcccggtaattccaattggatggcaccgcaagagggcctcccgcccggagccaatcaagagtgggccacatggaagtccttgaacaggctgcgctccggtgtgggacgctctaaggacaacctggcccgttggcactatctggaagagtcatccaccctgtgcgactgtggtgctgaacagactacccagcacatgtacgcttgcccccaatgccctgcctcctgcacggaagaggaactctttaaggcaaccgataacgcagtggcagtggcgcgcttttggagtaagacaatc

SEQ ID NO: 901 - DNA, 2937 bp, synthetic construct
  source 1..2937: mol_type = other DNA
atgctgtataccatcttcctcgtttatgggatcctgtgttttttctttgtgtatttctgcatctacctgtacatcactgtttatctttgttttctgttctttctgtttctgcttctgtgcggtgacgtggaaagcaatcctggaccaggcagagcccgtggatgtcggttgctgtattgcaacatccgcggtctgcatgctaatctggccgagctggactttgttagtcgcggggtggacgtggtctgctgttccgagactctggtggctgggcgtcgccacgatgccgagttggccctcgctggcttccagtccccctttcgtaggctctgtggctcaggccctggcttccgtggcatggcggtgtacgtcaggtctgggttctgtgcctaccggcagagtgtgcacgaatgtgcctgccacgagattatcgtcgttcgcgtgtgtggacgtctgaacaattactatctgttctctctctaccgctccccggccaccgatgactccctttacgattgccttctgactgccatggccagcatccagtccactgatccgaaggcagccttcgtcttcgttggcgacgtaaacgcacatcaccgggactggctgggaagcgcctctccaacagattgtcacggcgtcgccgctctggacttttgcaccctttccagctgcgtgcaactcgtccgtgggtccactcatatcgctggaaactgtctggatctggtgatgaccgacgtgcctgacctgatgaccgtgaccgtcggatccccgattggaagtagcgaccactcccacctggtggtctcactggatctcaaccaggtcgtgcctgttgtggatacacgcagggttgtgttcgtgaagagccgcgccaactgggtcgccatcactcgcgctgtgaggactctgccttggcggcagattatccactccgaggaccctgtaagtgagctcaatgacctgaccgtgtctattctggaacgctttgttcccaagcgcaccatcctcgtgagaagccgcgataagccttggttcgatgaccagtgtagactggctttcgaggctaagcaggcggcttaccgtgcttggcgtaggagtcgggaccgcacgttgtggcagacctatgtggacaggcgggccgaggccaagcgcgtgtatgaagaggctcagaggcgccttcgccagaggagccgtgaaagcctgctcagtattgaccaccctcatcgctggtggtcagagctcaagggctccgtgttcggcgccgaacccagcctgccccctctcgttggtcctggcggtggaatcattaccgatcccctcgccagggccgagctgctctccgcacattttgatggaaagcagtcacgcgatgtcatcgccttgccccacggttgccacccggagccccgcctcacatctctggccttcaggtccggcgctatcaaggtcctcctggaaggactcgacccctacggtggcgttgaccccgtcggcatgtttcctctgttttacaagcagctggcggacgtcctggccccaaagttggccgttatctttcgtcggctgatccgcctcggcaactttccccgctgctggcgcactggtaatatcactcccatccccaagggccccgtgagtccttacgtggccaattaccgtcccatcaccttgacacctatcctgtctaaggttttcgaaaagctgatcgcaggcaagctgggtcgctttgctgaagtcactggcttgctccctgctggtcagtttgcttatcgcatcggtctgggctgctgtgacgctctcctgtccgtgagccatcacctgcagtccgccctggactgccgctccgaagcccgcctggtgcagctcgatttctccgcagcgtttgaccgcgttaatcacaggggtcttctgtataaattggagtccttcggcgtcgggggccgggtgctgtcaattatccgtgatttcgtatccgagcgcacccagtctgtatccgtggacggtgttctgtccgccagcgtcggcgtggttagcggagtcccccagggtagcgtgctgggacctctgctctttgtattgtatacgtccgacatgttctctagcctggagaataccctcattaactatgcagatgactccactttgatggcagttattccggccccacgcctgcgtgacgccgtagcgcagtccctgaatagggacctgtcacgcatcagtgcctggtgttcagcttggtccatgaagctgaacgcgtccaagaccaaaagcatgattatctcaaggtccaggactttggtgcctcaacacccccagctggagatcgacgatactttgctgcaggagtcctcatccctggaaatcctgggcgtcgtgttcgatgagaagctcaccttcgagcctcacatcaggcggctggtgagccgcgcgtctaccaagatcgggctgctccgcaaggtgaactccgtgttcggcgattcccaggtcgcgaggcgttgcttttacgctttcctgctccctgtgctggagtactgctctccggtatgggcgagtgccgcggatacccatcttcgtcttctggaccgccttgtctccagcgccagccgtttgtgtgctgacaacgatctggtgaacctgagtcaccgtcggcgcgtggctgagctgtgtatgttctacaaggtgtacaataacgagaggcattggctgtactcatccctgccagccctgaaggtcttcgggcgcgaaacgcgtgccgcgtgcggtgctcactcttttacgttggaggcggttcgctgtcgcaccaaccagttctgccgctgctttgtgccttggtctgcgaaggtgtggaacctgctccctgcctccgctttcgggagaatcggtctgcaggcatttaaaagcgctgtgaacggtttcctgttggactttctg

SEQ ID NO: 902 - DNA, 2946 bp, synthetic construct
  source 1..2946: mol_type = other DNA
atggacgagtaccagcgctccttgtcccgccccctgttgacaatcatgagtattaatatcgaaggcttgagcctcgcgaaagaggaactgcttgccaagatgtccgaggacatcagctgcgacattctgtgcatccaagagacccatcgcgacatcaccatgcgtcgccccaagatcctcggtatgcagcttgcggtggagcgccctcaccgccagtacggctccgcgattttcgtgcgttccggtgtggccatttctgctaccagcctcaccgaggttaacaatattgagatcctgtcagtggagctcgattcctgtaccgtctccagtctgtacaaacctcccggtgcagacttctactttactcccccgacgtcttgccacaaccatgaggctcattttgtggttggtgatttcaattcccactcctgcgtgtggggctatgacgaggatgaccgcaacggcgaagctgttctgacctgggccgataattcccgcatgtccctgctccacgatagtaagctgcctccctccttcaacagtgggagatggaagcgcgggtacaaccctgcccttatcttcgtcaaagaatccatctctcatcagtgtaccaagcgcgtcctcaacccgattcctaacactcagcaccgccccatttgttgcgtagcatatgctgccgtgcgtcccaagtctgtccccttcagaaggagatacaacttcaacaaggctaactggaccaagtttaccgaaaccttggaagcggcaatctccgacattgagccatctatcgagaattatgatctcttcgttgaggcagtcaagcggtcctctcgcctgagtatcccccgtggatgtaggacctcctacctgcccggcctgaacgaagagtcactcaatcagctgcaggaatacctgcgcctgttccaagagaatccttactccgatggcaccatcgctgccggacaaaaactgagcaccgctctggcgaatgctaagaaagaccgctggatcgagctgctcgagaacctggacatgtccaagtctagccggaaagcttggcagctcctgcgccggctggacagcgaccccctcgtgaatcctggccatgccaatgtaacgccggaccagatcgcccatcaactgatccagaacggcaagaccaattgcagtagaatcaagatgaagatcaacagagtacccgagttggaaacacaccagctgtctagtcctctcaacctcaaagagctccgcgaagcaatcaaaaggtgtaagacgggcaaagctcccggtctggatgacctgatgatggaacagatcaaacacttgggggccaaggctgagaactggttgctgaaattctacaaccagtgcctggctcacaagcagatcccccgtgcgtggcgcaagactaagattatcgccatcttgaagccgggcaaggatgctagtaacgcccgcaactaccgtcctatttccctcctgtgtcacctttacaaggtgtacgagcgcatgctcctgaaccgcttgggccccgtcatcgagcctaaactgatcgcccaacaggctggtttccgcccaggtaagaactgcactggacagatcctgcaccttacggagcacatcgaggaaggttacgagaagggctgcatcaccggaaccgtcttcgtggacctgactgcggcctacgacacggttcagcacagaaaaatgctccacaaggtatatcatattacccgggatttcgacttcaccaaaacagtgcagacgcttctggagaatcgctccttttacgtcgagttccagggtcagaaaagtcggtggaggcgccagaagaacggcttgccccagggtagcgtgctcgccccaaccctgtttaatatcttcaccaacgaccagccacagcccccgctgacaaaatcctttatctatgccgacgatcttggcctgaccacgcaagccaaggactttgagacagtcgagaaacagctcacaaacgcactcaaggacctgagttcctattacaaggagaaccatctcaaacctaaccccgctaagacacaggtctgcgcttttcacctgaggaatcgggaggccaaccgtaaactgaaggtgacatgggagggacaggaactggagcactgtttccaccccaagtatttgggcgtgactctcgatcgcacccttacgtatcggaagcactgcatgaacactaagcataaggtggcggccagaaataacatcctgcgtaaactcacaggaagcgcctggggcgccgacccacaggtcatccgtaccagtgctctggccctgtctttctccactgctgaatatgcgtgtccggtgtggcacaagtccgcccacgcgaagcaggtggatattgccctgaacgagacatgccggattatcactggttgcctcaagcctacccccgtcgacaagctctataagttggccggcattgcaccccctgatgtccgtcgcgaagtcgcagccaatggcgagcggaaaaaggtagaacactgcgaatcacatccgctgcatggatatcatccccctcccacccggcttaagagccgtaagggcttcatgcgcacaaccactccgctggatgtgcctcccgctgccgcgcgcgtgagtctgtgggccgctaagcccggtaattccaattggatggcaccgcaagagggcctcccgcccggagccaatcaagagtgggccacatggaagtccttgaacaggctgcgctccggtgtgggacgctctaaggacaacctggcccgttggcactatctggaagagtcatccaccctgtgcgactgtggtgctgaacagactacccagcacatgtacgcttgcccccaatgccctgcctcctgcacggaagaggaactctttaaggcaaccgataacgcagtggcagtggcgcgcttttggagtaagacaatc

SEQ ID NO: 903 - DNA, 2937 bp, synthetic construct
  source 1..2937: mol_type = other DNA
atgctgtataccatcttcctcgtttatgggatcctgtgttttttctttgtgtatttctgcatctacctgtacatcactgtttatctttgttttctgttctttctgtttctgcttctgtgcggtgacgtggaaagcaatcctggaccaggcagagcccgtggatgtcggttgctgtattgcaacatccgcggtctgcatgctaatctggccgagctggactttgttagtcgcggggtggacgtggtctgctgttccgagactctggtggctgggcgtcgccacgatgccgagttggccctcgctggcttccagtccccctttcgtaggctctgtggctcaggccctggcttccgtggcatggcggtgtacgtcaggtctgggttctgtgcctaccggcagagtgtgcacgaatgtgcctgccacgagattatcgtcgttcgcgtgtgtggacgtctgaacaattactatctgttctctctctaccgctccccggccaccgatgactccctttacgattgccttctgactgccatggccagcatccagtccactgatccgaaggcagccttcgtcttcgttggcgacgtaaacgcacatcaccgggactggctgggaagcgcctctccaacagattgtcacggcgtcgccgctctggacttttgcaccctttccagctgcgtgcaactcgtccgtgggtccactcatatcgctggaaactgtctggatctggtgatgaccgacgtgcctgccctgatgaccgtgaccgtcggatccccgattggaagtagcgaccactcccacctggtggtctcactggatctcaaccaggtcgtgcctgttgtggatacacgcagggttgtgttcgtgaagagccgcgccaactgggtcgccatcactcgcgctgtgaggactctgccttggcggcagattatccactccgaggaccctgtaagtgagctcaatgacctgaccgtgtctattctggaacgctttgttcccaagcgcaccatcctcgtgagaagccgcgataagccttggttcgatgaccagtgtagactggctttcgaggctaagcaggcggcttaccgtgcttggcgtaggagtcgggaccgcacgttgtggcagacctatgtggacaggcgggccgaggccaagcgcgtgtatgaagaggctcagaggcgccttcgccagaggagccgtgaaagcctgctcagtattgaccaccctcatcgctggtggtcagagctcaagggctccgtgttcggcgccgaacccagcctgccccctctcgttggtcctggcggtggaatcattaccgatcccctcgccagggccgagctgctctccgcacattttgatggaaagcagtcacgcgatgtcatcgccttgccccacggttgccacccggagccccgcctcacatctctggccttcaggtccggcgctatcaaggtcctcctggaaggactcgacccctacggtggcgttgaccccgtcggcatgtttcctctgttttacaagcagctggcggacgtcctggccccaaagttggccgttatctttcgtcggctgatccgcctcggcaactttccccgctgctggcgcactggtaatatcactcccatccccaagggccccgtgagtccttacgtggccaattaccgtcccatcaccttgacacctatcctgtctaaggttttcgaaaagctgatcgcaggcaagctgggtcgctttgctgaagtcactggcttgctccctgctggtcagtttgcttatcgcatcggtctgggctgctgtgacgctctcctgtccgtgagccatcacctgcagtccgccctggactgccgctccgaagcccgcctggtgcagctcgatttctccgcagcgtttgaccgcgttaatcacaggggtcttctgtataaattggagtccttcggcgtcgggggccgggtgctgtcaattatccgtgatttcgtatccgagcgcacccagtctgtatccgtggacggtgttctgtccgccagcgtcggcgtggttagcggagtcccccagggtagcgtgctgggacctctgctctttgtattgtatacgtccgacatgttctctagcctggagaataccctcattaactatgcagatgactccactttgatggcagttattccggccccacgcctgcgtgacgccgtagcgcagtccctgaatagggacctgtcacgcatcagtgcctggtgttcagcttggtccatgaagctgaacgcgtccaagaccaaaagcatgattatctcaaggtccaggactttggtgcctcaacacccccagctggagatcgacgatactttgctgcaggagtcctcatccctggaaatcctgggcgtcgtgttcgatgagaagctcaccttcgagcctcacatcaggcggctggtgagccgcgcgtctaccaagatcgggctgctccgcaaggtgaactccgtgttcggcgattcccaggtcgcgaggcgttgcttttacgctttcctgctccctgtgctggagtactgctctccggtatgggcgagtgccgcggatacccatcttcgtcttctggaccgccttgtctccagcgccagccgtttgtgtgctgacaacgatctggtgaacctgagtcaccgtcggcgcgtggctgagctgtgtatgttctacaaggtgtacaataacgagaggcattggctgtactcatccctgccagccctgaaggtcttcgggcgcgaaacgcgtgccgcgtgcggtgctcactcttttacgttggaggcggttcgctgtcgcaccaaccagttctgccgctgctttgtgccttggtctgcgaaggtgtggaacctgctccctgcctccgctttcgggagaatcggtctgcaggcatttaaaagcgctgtgaacggtttcctgttggactttctg

SEQ ID NO: 904 - DNA, 3060 bp, synthetic construct
  source 1..3060: mol_type = other DNA
atggacgagtaccagcgctccttgtcccgccccctgttgacaatcatgagtattaatatcgaaggcttgagcctcgcgaaagaggaactgcttgccaagatgtccgaggacatcagctgcgacattctgtgcatccaagagacccatcgcgacatcaccatgcgtcgccccaagatcctcggtatgcagcttgcggtggagcgccctcaccgccagtacggctccgcgattttcgtgcgttccggtgtggccatttctgctaccagcctcaccgaggttaacaatattgagatcctgtcagtggagctcgattcctgtaccgtctccagtctgtacaaacctcccggtgcagacttctactttactcccccgacgtcttgccacaaccatgaggctcattttgtggttggtgatttcaattcccactcctgcgtgtggggctatgacgaggatgaccgcaacggcgaagctgttctgacctgggccgataattcccgcatgtccctgctccacgatagtaagctgcctccctccttcaacagtgggagatggaagcgcgggtacaaccctgatcttatcttcgtcaaagaatccatctctcatcagtgtaccaagcgcgtcctcaacccgattcctaacactcagcaccgccccatttgttgcgtagcatatgctgccgtgcgtcccaagtctgtccccttcagaaggagatacaacttcaacaaggctaactggaccaagtttaccgaaaccttggaagcggcaatctccgacattgagccatctatcgagaattatgatctcttcgttgaggcagtcaagcggtcctctcgcctgagtatcccccgtggatgtaggacctcctacctgcccggcctgaacgaagagtcactcaatcagctgcaggaatacctgcgcctgttccaagagaatccttactccgatggcaccatcgctgccggacaaaaactgagcaccgctctggcgaatgctaagaaagaccgctggatcgagctgctcgagaacctggacatgtccaagtctagccggaaagcttggcagctcctgcgccggctggacagcgaccccctcgtgaatcctggccatgccaatgtaacgccggaccagatcgcccatcaactgatccagaacggcaagaccaattgcagtagaatcaagatgaagatcaacagagtacccgagttggaaacacaccagctgtctagtcctctcaacctcaaagagctccgcgaagcaatcaaaaggtgtaagacgggcaaagctcccggtctggatgacctgatgatggaacagatcaaacacttgggggccaaggctgagaactggttgctgaaattctacaaccagtgcctggctcacaagcagatcccccgtgcgtggcgcaagactaagattatcgccatcttgaagccgggcaaggatgctagtaacgcccgcaactaccgtcctatttccctcctgtgtcacctttacaaggtgtacgagcgcatgctcctgaaccgcttgggccccgtcatcgagcctaaactgatcgcccaacaggctggtttccgcccaggtaagaactgcactggacagatcctgcaccttacggagcacatcgaggaaggttacgagaagggctgcatcaccggaaccgtcttcgtggacctgactgcggcctacgacacggttcagcacagaaaaatgctccacaaggtatatcatattacccgggatttcgacttcaccaaaacagtgcagacgcttctggagaatcgctccttttacgtcgagttccagggtcagaaaagtcggtggaggcgccagaagaacggcttgccccagggtagcgtgctcgccccaaccctgtttaatatcttcaccaacgaccagccacagcccccgctgacaaaatcctttatctatgccgacgatcttggcctgaccacgcaagccaaggactttgagacagtcgagaaacagctcacaaacgcactcaaggacctgagttcctattacaaggagaaccatctcaaacctaaccccgctaagacacaggtctgcgcttttcacctgaggaatcgggaggccaaccgtaaactgaaggtgacatgggagggacaggaactggagcactgtttccaccccaagtatttgggcgtgactctcgatcgcacccttacgtatcggaagcactgcatgaacactaagcataaggtggcggccagaaataacatcctgcgtaaactcacaggaagcgcctggggcgccgacccacaggtcatccgtaccagtgctctggccctgtctttctccactgctgaatatgcgtgtccggtgtggcacaagtccgcccacgcgaagcaggtggatattgccctgaacgagacatgccggattatcactggttgcctcaagcctacccccgtcgacaagctctataagttggccggcattgcaccccctgatgtccgtcgcgaagtcgcagccaatggcgagcggaaaaaggtagaacactgcgaatcacatccgctgcatggatatcatccccctcccacccggcttaagagccgtaagggcttcatgcgcacaaccactccgctggatgtgcctcccgctgccgcgcgcgtgagtctgtgggccgctaagcccggtaattccaattggatggcaccgcaagagggcctcccgcccggagccaatcaagagtgggccacatggaagtccttgaacaggctgcgctccggtgtgggacgctctaaggacaacctggcccgttggcactatctggaagagtcatccaccctgtgcgactgtggtgctgaacagactacccagcacatgtacgcttgcccccaatgccctgcctcctgcacggaagaggaactctttaaggcaaccgataacgcagtggcagtggcgcgcttttggagtaagacaatcggcggcggctcccccaagaagaagcggaaggtgagcggcagcgagactcccgggacctcagagtccgccacacccgaaagtgtgagcggctggcggctgttcaagaagattagc

SEQ ID NO: 905 - DNA, 2937 bp, synthetic construct
  source 1..2937: mol_type = other DNA
atgctgtataccatcttcctcgtttatgggatcctgtgttttttctttgtgtatttctgcatctacctgtacatcactgtttatctttgttttctgttctttctgtttctgcttctgtgcggtgacgtggaaagcaatcctggaccaggcagagcccgtggatgtcggttgctgtattgcaacatccgcggtctgcatgctaatctggccgagctggactttgttagtcgcggggtggacgtggtctgctgttccgagactctggtggctgggcgtcgccacgatgccgagttggccctcgctggcttccagtccccctttcgtaggctctgtggctcaggccctggcttccgtggcatggcggtgtacgtcaggtctgggttctgtgcctaccggcagagtgtgcacgaatgtgcctgccacgagattatcgtcgttcgcgtgtgtggacgtctgaacaattactatctgttctctctctaccgctccccggccaccgatgactccctttacgattgccttctgactgccatggccagcatccagtccactgatccgaaggcagccttcgtcttcgttggcgacgtaaacgcacatcaccgggactggctgggaagcgcctctccaacagattgtcacggcgtcgccgctctggacttttgcaccctttccagctgcgtgcaactcgtccgtgggtccactcatatcgctggaaactgtctggatctggtgatgaccgacgtgcctgacctgatgaccgtgaccgtcggatccccgattggaagtagcgaccactcccacctggtggtctcactggatctcaaccaggtcgtgcctgttgtggatacacgcagggttgtgttcgtgaaaagccgcgccaactgggtcgccatcactcgcgctgtgaggactctgccttggcggcagattatccactccgaggaccctgtaagtgagctcaatgacctgaccgtgtctattctggaacgctttgttcccaagcgcaccatcctcgtgagaagccgcgataagccttggttcgatgaccagtgtagactggctttcgaggctaagcaggcggcttaccgtgcttggcgtaggagtcgggaccgcacgttgtggcagacctatgtggacaggcgggccgaggccaagcgcgtgtatgaagaggctcagaggcgccttcgccagaggagccgtgaaagcctgctcagtattgaccaccctcatcgctggtggtcagagctcaagggctccgtgttcggcgccgaacccagcctgccccctctcgttggtcctggcggtggaatcattaccgatcccctcgccagggccgagctgctctccgcacattttgatggaaagcagtcacgcgatgtcatcgccttgccccacggttgccacccggagccccgcctcacatctctggccttcaggtccggcgctatcaaggtcctcctggaaggactcgacccctacggtggcgttgaccccgtcggcatgtttcctctgttttacaagcagctggcggacgtcctggccccaaagttggccgttatctttcgtcggctgatccgcctcggcaactttccccgctgctggcgcactggtaatatcactcccatccccaagggccccgtgagtccttacgtggccaattaccgtcccatcaccttgacacctatcctgtctaaggttttcgaaaagctgatcgcaggcaagctgggtcgctttgctgaagtcactggcttgctccctgctggtcagtttgcttatcgcatcggtctgggctgctgtgacgctctcctgtccgtgagccatcacctgcagtccgccctggactgccgctccgaagcccgcctggtgcagctcgatttctccgcagcgtttgaccgcgttaatcacaggggtcttctgtataaattggagtccttcggcgtcgggggccgggtgctgtcaattatccgtgatttcgtatccgagcgcacccagtctgtatccgtggacggtgttctgtccgccagcgtcggcgtggttagcggagtcccccagggtagcgtgctgggacctctgctctttgtattgtatacgtccgacatgttctctagcctggagaataccctcattaactatgcagatgactccactttgatggcagttattccggccccacgcctgcgtgacgccgtagcgcagtccctgaatagggacctgtcacgcatcagtgcctggtgttcagcttggtccatgaagctgaacgcgtccaagaccaaaagcatgattatctcaaggtccaggactttggtgcctcaacacccccagctggagatcgacgatactttgctgcaggagtcctcatccctggaaatcctgggcgtcgtgttcgatgagaagctcaccttcgagcctcacatcaggcggctggtgagccgcgcgtctaccaagatcgggctgctccgcaaggtgaactccgtgttcggcgattcccaggtcgcgaggcgttgcttttacgctttcctgctccctgtgctggagtactgctctccggtatgggcgagtgccgcggatacccatcttcgtcttctggaccgccttgtctccagcgccagccgtttgtgtgctgacaacgatctggtgaacctgagtcaccgtcggcgcgtggctgagctgtgtatgttctacaaggtgtacaataacgagaggcattggctgtactcatccctgccagccctgaaggtcttcgggcgcgaaacgcgtgccgcgtgcggtgctcactcttttacgttggaggcggttcgctgtcgcaccaaccagttctgccgctgctttgtgccttggtctgcgaaggtgtggaacctgctccctgcctccgctttcgggagaatcggtctgcaggcatttaaaagcgctgtgaacggtttcctgttggactttctg

SEQ ID NO: 906-999 - skipped (94 entries)

SEQ ID NO: 1000 - DNA, 1351 bp, synthetic construct
  source 1..1351: mol_type = other DNA
agggggacacggaaagagcctccccgaagattgagtgaattcagtcgggcgtcccctgggcaacgtttcttgtaagcggccgatctttccaccccaaaagcattggatgagtttacggatccgaattctcgacggatcgatccgaacaaacgacccaacacccgtgcgttttattctgtctttttattgccgatcccccggccgctttacttgtacagctcgtccatgccgagagtgatcccggcggcggtcacgaactccagcaggaccatgtgatcgcgcttctcgttggggtctttgctcagggcggactgggtgctcaggtagtggttgtcgggcagcagcacggggccgtcgccgatgggggtgttctgctggtagtggtcggcgagctgcacgctgccgtcctcgatgttgtggcggatcttgaagttcaccttgatgccgttcttctgcttgtcggccatgatatagacgttgtggctgttgtagttgtactccagcttgtgccccaggatgttgccgtcctccttgaagtcgatgcccttcagctcgatgcggttcaccagggtgtcgccctcgaacttcacctcggcgcgggtcttgtagttgccgtcgtccttgaagaagatggtgcgctcctggacgtagccttcgggcatggcggacttgaagaagtcgtgctgcttcatgtggtcggggtagcggctgaagcactgcacgccgtaggtcagggtggtcacgagggtgggccagggcacgggcagcttgccggtggtgcagatgaacttcagggtcagcttgccgtaggtggcatcgccctcgccctcgccggacacgctgaacttgtggccgtttacgtcgccgtccagctcgaccaggatgggcaccaccccggtgaacagctcctcgcccttgctcaccatggtggctttaccaacagtaccggaatgccaagcttgggtcctgtgttctggcggcaaacccgttgcgaaaaagaacgttcacggcgactactgcacttatatacggttctcccccaccctcgggaaaaaggcggagccagtacacgacatcactttcccagtttaccccgcgccaccttctctaggcaccggatcaattgccgacccctccccccaacttctcggggactgtgggcgatgtgcgctctgccctagttgcttgtgatttcttttcttttttattttatttccattatttgaaatgtatttgttgtagcaatgcttttgacacgaaataaataaaagaaaaaaaaaaaaaaaaaaaaaaaaaaaaaaaaaaaaaaaaaaaaaaaaaaaaaaaaaaaaaaaaaaaaaaaaaaaaaaaa

SEQ ID NO: 1001 - DNA, 1401 bp, synthetic construct
  source 1..1401: mol_type = other DNA
gggggacacggaaagagcctccccgaagattgagtgaattcagtcgggcgtcccctgggcaacgtttcttgtaagcggccgatctttccaccccaaaagcattggatgagtttacggatccgaattctcgacggatcgatccgaacaaacgacccaacacccgtgcgttttattctgtctttttattgccgatcccccggccgctttacttgtacagctcgtccatgccgagagtgatcccggcggcggtcacgaactccagcaggaccatgtgatcgcgcttctcgttggggtctttgctcagggcggactgggtgctcaggtaagtatcaaggttacaagacaggtttaaggagaccaatagaaactgggcttgtcgagacagagaagactcttgcgtttctgataggcacctattggtcttactgacatccactttgcctttctctccacaggtagtggttgtcgggcagcagcacggggccgtcgccgatgggggtgttctgctggtagtggtcggcgagctgcacgctgccgtcctcgatgttgtggcggatcttgaagttcaccttgatgccgttcttctgcttgtcggccatgatatagacgttgtggctgttgtagttgtactccagcttgtgccccaggatgttgccgtcctccttgaagtcgatgcccttcagctcgatgcggttcaccagggtgtcgccctcgaacttcacctcggcgcgggtcttgtagttgccgtcgtccttgaagaagatggtgcgctcctggacgtagccttcgggcatggcggacttgaagaagtcgtgctgcttcatgtggtcggggtagcggctgaagcactgcacgccgtaggtcagggtggtcacgagggtgggccagggcacgggcagcttgccggtggtgcagatgaacttcagggtcagcttgccgtaggtggcatcgccctcgccctcgccggacacgctgaacttgtggccgtttacgtcgccgtccagctcgaccaggatgggcaccaccccggtgaacagctcctcgcccttgctcaccatggtggctttaccaacagtaccggaatgccaagcttgggtcctgtgttctggcggcaaacccgttgcgaaaaagaacgttcacggcgactactgcacttatatacggttctcccccaccctcgggaaaaaggcggagccagtacacgacatcactttcccagtttaccccgcgccaccttctctaggcaccggatcaattgccgacccctccccccaacttctcggggactgtgggcgatgtgcgctctgccctagttgcttgtgatttcttttcttttttattttatttccattatttgaaatgtatttgttgtagcaatgcttttgacacgaaataaataaa

SEQ ID NO: 1002 - DNA, 1683 bp, synthetic construct
  source 1..1683: mol_type = other DNA
gcgtggcctgcgcgttatcaggccgcccccattgtccggccaccggacgcctctttgtttgtatgagctggctttgggtttggggctctgggtagcccctgagttggaggaaatgccactctaaaggcggatgagacctcttttggtccaacggcatccctgagaggagatgaacaggctggtgccatagctgggtactcagtcttccgcagtctgctcctctctctcttccatcaggtagtaccacctgatgctcttttcctttcctttctcttcttcttcttttcggccaaagcctgtactggtgatggcagggtctggggcgcgtagatagctggccgctttcgtagctatcgttactgtcgatttgtttttgctttattgtttacggatccgaattctcgacggatcgatccgaacaaacgacccaacacccgtgcgttttattctgtctttttattgccgatcccccggccgctttacttgtacagctcgtccatgccgagagtgatcccggcggcggtcacgaactccagcaggaccatgtgatcgcgcttctcgttggggtctttgctcagggcggactgggtgctcaggtaagtatcaaggttacaagacaggtttaaggagaccaatagaaactgggcttgtcgagacagagaagactcttgcgtttctgataggcacctattggtcttactgacatccactttgcctttctctccacaggtagtggttgtcgggcagcagcacggggccgtcgccgatgggggtgttctgctggtagtggtcggcgagctgcacgctgccgtcctcgatgttgtggcggatcttgaagttcaccttgatgccgttcttctgcttgtcggccatgatatagacgttgtggctgttgtagttgtactccagcttgtgccccaggatgttgccgtcctccttgaagtcgatgcccttcagctcgatgcggttcaccagggtgtcgccctcgaacttcacctcggcgcgggtcttgtagttgccgtcgtccttgaagaagatggtgcgctcctggacgtagccttcgggcatggcggacttgaagaagtcgtgctgcttcatgtggtcggggtagcggctgaagcactgcacgccgtaggtcagggtggtcacgagggtgggccagggcacgggcagcttgccggtggtgcagatgaacttcagggtcagcttgccgtaggtggcatcgccctcgccctcgccggacacgctgaacttgtggccgtttacgtcgccgtccagctcgaccaggatgggcaccaccccggtgaacagctcctcgcccttgctcaccatggtggctttaccaacagtaccggaatgccaagcttgggtcctgtgttctggcggcaaacccgttgcgaaaaagaacgttcacggcgactactgcacttatatacggttctcccccaccctcgggaaaaaggcggagccagtacacgacatcactttcccagtttaccccgcgccaccttctctaggcaccggatcaattgccgacccctccccccaacttctcggggactgtgggcgatgtgcgctctgccctagcagcgttttgggcttcccggtgttgcaagatgcttcatttgggttgtattacctgtccgtgggagctcaagcgtgaagttttaataataataataa

SEQ ID NO: 1003 - DNA, 2601 bp, synthetic construct
  source 1..2601: mol_type = other DNA
atggctctgccggtgaccgccctgcttctgcctcttgccctgctcttgcatgccgctcgcccgcaggtgcagcttgttcagtccggcgcggaggtaaaaaagcctggcgccagcgtgaaagtgagctgtaaggcttccggctacagcttcccagattactatatcaattgggtgcggcaggctcccgggcagggactcgagtggatgggttggatctattttgcgagcggaaactctgagtacaaccagaagttcaccggcagggttaccatgacccgcgacacgtcaagttctacggcatacatggagctgtctagtctcaggtccgaagataccgccgtgtatttctgcgcctccctgtatgattatgactggtacttcgacgtctggggccagggcaccatggtgacagtgtcttccggtggcggtggctccggcggaggtggctctggagggggtggcagcgatatcgtgatgacccagactccactgtctctgtctgtgacccctggtgagccggcgagcatctcctgcaagagttcccagagtctggtccactctaacggcaacacctacctgcactggtatctgcagaagccgggccaaagtccacagctcctgatctacaaggtttccaaccgtttcagcggggtcccggatcgcttttccggctcaggtagcggtgccgatttcaccctgaagattagtcgggtcgaggctgaggacgtcggcgtctactattgtgcagagaccagtcacgtcccctggactttcggtcaggggaccaaactggagatcaagaccacaacacctgctccaaggccccccacacccgctccaactatagccagccaaccattgagcctcagacctgaagcttgcaggcccgcagcaggaggcgccgtccatacgcgaggcctggacttcgcgtgtgatatttatatttgggcccctttggccggaacatgtggggtgttgcttctctcccttgtgatcactctgtattgtaggagtaagaggagcaggctcctgcacagtgactacatgaacatgactccccgccgccccgggcccacccgcaagcattaccagccctatgccccaccacgcgacttcgcagcctatcgctccagggtgaaattttctagaagcgccgatgctcccgcatatcagcagggtcagaatcagctctacaatgaattgaatctcggcaggcgagaagagtacgatgttctggacaagagacggggcagggatcccgagatggggggaaagccccggagaaaaaatcctcaggaggggttgtacaatgagctgcagaaggacaagatggctgaagcctatagcgagatcggaatgaaaggcgaaagacgcagaggcaaggggcatgacggtctgtaccagggtctctctacagccaccaaggacacttatgatgcgttgcatatgcaagccttgccaccccgcggaagtggtgagggcagaggaagtcttctaacatgcggtgacgtggaggagaatcccggccctatgcttctcctggtgacaagccttctgctctgtgagttaccacacccagcattcctcctgatcccacgcaaagtgtgtaacggaataggtattggtgaatttaaagactcactctccataaatgctacgaatattaaacacttcaaaaactgcacctccatcagtggcgatctccacatcctgccggtggcatttaggggtgactccttcacacatactcctcctctggatccacaggaactggatattctgaaaaccgtaaaggaaatcacagggtttttgctgattcaggcttggcctgaaaacaggacggacctccatgcctttgagaacctagaaatcatacgcggcaggaccaagcaacatggtcagttttctcttgcagtcgtcagcctgaacataacatccttgggattacgctccctcaaggagataagtgatggagatgtgataatttcaggaaacaaaaatttgtgctatgcaaatacaataaactggaaaaaactgtttgggacctccggtcagaaaaccaaaattataagcaacagaggtgaaaacagctgcaaggccacaggccaggtctgccatgccttgtgctcccccgagggctgctggggcccggagcccagggactgcgtctcttgccggaatgtcagccgaggcagggaatgcgtggacaagtgcaaccttctggagggtgagccaagggagtttgtggagaactctgagtgcatacagtgccacccagagtgcctgcctcaggccatgaacatcacctgcacaggacggggaccagacaactgtatccagtgtgcccactacattgacggcccccactgcgtcaagacctgcccggcaggagtcatgggagaaaacaacaccctggtctggaagtacgcagacgccggccatgtgtgccacctgtgccatccaaactgcacctacggatgcactgggccaggtcttgaaggctgtccaacgaatgggcctaagatcccgtccatcgccactgggatggtgggggccctcctcttgctgctggtggtggccctggggatcggcctcttcatg

SEQ ID NO: 1004 - DNA, 717 bp, synthetic construct
  source 1..717: mol_type = other DNA
atggtgagcaagggcgaggagctgttcaccggggtggtgcccatcctggtcgagctggacggcgacgtaaacggccacaagttcagcgtgtccggcgagggcgagggcgatgccacctacggcaagctgaccctgaagttcatctgcaccaccggcaagctgcccgtgccctggcccaccctcgtgaccaccctgacctacggcgtgcagtgcttcagccgctaccccgaccacatgaagcagcacgacttcttcaagtccgccatgcccgaaggctacgtccaggagcgcaccatcttcttcaaggacgacggcaactacaagacccgcgccgaggtgaagttcgagggcgacaccctggtgaaccgcatcgagctgaagggcatcgacttcaaggaggacggcaacatcctggggcacaagctggagtacaactacaacagccacaacgtctatatcatggccgacaagcagaagaacggcatcaaggtgaacttcaagatccgccacaacatcgaggacggcagcgtgcagctcgccgaccactaccagcagaacacccccatcggcgacggccccgtgctgctgcccgacaaccactacctgagcacccagtccgccctgagcaaagaccccaacgagaagcgcgatcacatggtcctgctggagttcgtgaccgccgccgggatcactctcggcatggacgagctgtacaag

SEQ ID NO: 1005 - DNA, 6234 bp, synthetic construct
  source 1..6234: mol_type = other DNA
tctatggcttctgaggcggaaagaaccagctggggctctagggggtatccccctgtggaatgtgtgtcagttagggtgtggaaagtccccaggctccccagcaggcagaagtatgcaaagcatgcatctcaattagtcagcaaccaggtgtggaaagtccccaggctccccagcaggcagaagtatgcaaagcatgcatctcaattagtcagcaaccatagtcccgcccctaactccgcccatcccgcccctaactccgcccagttccgcccattctccgccccatggctgactaattttttttatttatgcagaggccgaggccgcctctgcctctgagctattccagaagtagtgaggaggcttttttggaggcctaggcttttgcaaaaagctcccgggagcttgtatatccattttcggatctgatcaagagacaggatgaggatcgtttcgcatgaccgagtacaagcccacggtgcgcctcgccacccgcgacgacgtccccagggccgtacgcaccctcgccgccgcgttcgccgactaccccgccacgcgccacaccgtcgatccggaccgccacatcgagcgggtcaccgagctgcaagaactcttcctcacgcgcgtcgggctcgacatcggcaaggtgtgggtcgcggacgacggcgccgcggtggcggtctggaccacgccggagagcgtcgaagcgggggcggtgttcgccgagatcggcccgcgcatggccgagttgagcggttcccggctggccgcgcagcaacagatggagggcctcctggcgccgcaccggcccaaggagcccgcgtggttcctggccaccgtcggcgtctcgcccgaccaccagggcaagggtctgggcagcgccgtcgtgctccccggagtggaggccgccgagcgcgccggggtgcccgccttcctggagacctccgcgccccgcaacctccccttctacgagcggctcggcttcaccgtcaccgccgacgtcgaggtgcccgaaggaccgcgcacctggtgcatgacccgcaagcccggtgcctaggcgggactctggggttcgaaatgaccgaccaagcgacgcccaacctgccatcacgagatttcgattccaccgccgccttctatgaaaggttgggcttcggaatcgttttccgggacgccggctggatgatcctccagcgcggggatctcatgctggagttcttcgcccaccccaacttgtttattgcagcttataatggttacaaataaagcaatagcatcacaaatttcacaaataaagcatttttttcactgcattctagttgtggtttgtccaaactcatcaatgtatcttatcatgtctgtataccgtcgacctctagctagagcttggcgtaatcatggtcatagctgtttcctgtgtgaaattgttatccgctcacaattccacacaacatacgagccggaagcataaagtgtaaagcctggggtgcctaatgagtgagctaactcacattaattgcgttgcgctcactgcccgctttccagtcgggaaacctgtcgtgccagctgcattaatgaatcggccaacgcgcggggagaggcggtttgcgtattgggcgctcttccgcttcctcgctcactgactcgctgcgctcggtcgttcggctgcggcgagcggtatcagctcactcaaaggcggtaatacggttatccacagaatcaggggataacgcaggaaagaacatgtgagcaaaaggccagcaaaaggccaggaaccgtaaaaaggccgcgttgctggcgtttttccataggctccgcccccctgacgagcatcacaaaaatcgacgctcaagtcagaggtggcgaaacccgacaggactataaagataccaggcgtttccccctggaagctccctcgtgcgctctcctgttccgaccctgccgcttaccggatacctgtccgcctttctcccttcgggaagcgtggcgctttctcatagctcacgctgtaggtatctcagttcggtgtaggtcgttcgctccaagctgggctgtgtgcacgaaccccccgttcagcccgaccgctgcgccttatccggtaactatcgtcttgagtccaacccggtaagacacgacttatcgccactggcagcagccactggtaacaggattagcagagcgaggtatgtaggcggtgctacagagttcttgaagtggtggcctaactacggctacactagaagaacagtatttggtatctgcgctctgctgaagccagttaccttcggaaaaagagttggtagctcttgatccggcaaacaaaccaccgctggtagcggtttttttgtttgcaagcagcagattacgcgcagaaaaaaaggatctcaagaagatcctttgatcttttctacggggtctgacgctcagtggaacgaaaactcacgttaagggattttggtcatgagattatcaaaaaggatcttcacctagatccttttaaattaaaaatgaagttttaaatcaatctaaagtatatatgagtaaacttggtctgacagttaccaatgcttaatcagtgaggcacctatctcagcgatctgtctatttcgttcatccatagttgcctgactccccgtcgtgtagataactacgatacgggagggcttaccatctggccccagtgctgcaatgataccgcgagacccacgctcaccggctccagatttatcagcaataaaccagccagccggaagggccgagcgcagaagtggtcctgcaactttatccgcctccatccagtctattaattgttgccgggaagctagagtaagtagttcgccagttaatagtttgcgcaacgttgttgccattgctacaggcatcgtggtgtcacgctcgtcgtttggtatggcttcattcagctccggttcccaacgatcaaggcgagttacatgatcccccatgttgtgcaaaaaagcggttagctccttcggtcctccgatcgttgtcagaagtaagttggccgcagtgttatcactcatggttatggcagcactgcataattctcttactgtcatgccatccgtaagatgcttttctgtgactggtgagtactcaaccaagtcattctgagaatagtgtatgcggcgaccgagttgctcttgcccggcgtcaatacgggataataccgcgccacatagcagaactttaaaagtgctcatcattggaaaacgttcttcggggcgaaaactctcaaggatcttaccgctgttgagatccagttcgatgtaacccactcgtgcacccaactgatcttcagcatcttttactttcaccagcgtttctgggtgagcaaaaacaggaaggcaaaatgccgcaaaaaagggaataagggcgacacggaaatgttgaatactcatactcttcctttttcaatattattgaagcatttatcagggttattgtctcatgagcggatacatatttgaatgtatttagaaaaataaacaaataggggttccgcgcacatttccccgaaaagtgccacctgacgtcgacggatcgggagatctcccgatcccctatggtgcactctcagtacaatctgctctgatgccgcatagttaagccagtatctgctccctgcttgtgtgttggaggtcgctgagtagtgcgcgagcaaaatttaagctacaacaaggcaaggcttgaccgacaattgcatgaagaatctgcttagggttaggcgttttgcgctgcttcgcgatgtacgggccagatatacgcgttgacattgattattgactagttattaatagtaatcaattacggggtcattagttcatagcccatatatggagttccgcgttacataacttacggtaaatggcccgcctggctgaccgcccaacgacccccgcccattgacgtcaataatgacgtatgttcccatagtaacgccaatagggactttccattgacgtcaatgggtggagtatttacggtaaactgcccacttggcagtacatcaagtgtatcatatgccaagtacgccccctattgacgtcaatgacggtaaatggcccgcctggcattatgcccagtacatgaccttatgggactttcctacttggcagtacatctacgtattagtcatcgctattaccatggtgatgcggttttggcagtacatcaatgggcgtggatagcggtttgactcacggggatttccaagtctccaccccattgacgtcaatgggagtttgttttggcaccaaaatcaacgggactttccaaaatgtcgtaacaactccgccccattgacgcaaatgggcggtaggcgtgtacggtgggaggtctatataagcagagctctctggctaactagagaacccactgcttactggcttatcgaaattaatacgactcactatagggagacccaagctggcgtggcctgcgcgttatcaggccgcccccattgtccggccaccggacgcctctttgtttgtatgagctggctttgggtttggggctctgggtagcccctgagttggaggaaatgccactctaaaggcggatgagacctcttttggtccaacggcatccctgagaggagatgaacaggctggtgccatagctgggtactcagtcttccgcagtctgctcctctctctcttccatcaggtagtaccacctgatgctcttttcctttcctttctcttcttcttcttttcggccaaagcctgtactggtgatggcagggtctggggcgcgtagatagctggccgctttcgtagctatcgttactgtcgatttgtttttgctttattgtttacggatccgaattctcgacggatcgatccgaacaaacgacccaacacccgtgcgttttattctgtctttttattgccgatcccccggccgctttacttgtacagctcgtccatgccgagagtgatcccggcggcggtcacgaactccagcaggaccatgtgatcgcgcttctcgttggggtctttgctcagggcggactgggtgctcaggtagtggttgtcgggcagcagcacggggccgtcgccgatgggggtgttctgctggtagtggtcggcgagctgcacgctgccgtcctcgatgttgtggcggatcttgaagttcaccttgatgccgttcttctgcttgtcggccatgatatagacgttgtggctgttgtagttgtactccagcttgtgccccaggatgttgccgtcctccttgaagtcgatgcccttcagctcgatgcggttcaccagggtgtcgccctcgaacttcacctcggcgcgggtcttgtagttgccgtcgtccttgaagaagatggtgcgctcctggacgtagccttcgggcatggcggacttgaagaagtcgtgctgcttcatgtggtcggggtagcggctgaagcactgcacgccgtaggtcagggtggtcacgagggtgggccagggcacgggcagcttgccggtggtgcagatgaacttcagggtcagcttgccgtaggtggcatcgccctcgccctcgccggacacgctgaacttgtggccgtttacgtcgccgtccagctcgaccaggatgggcaccaccccggtgaacagctcctcgcccttgctcaccatggtggctttaccaacagtaccggaatgccaagcttgggtcctgtgttctggcggcaaacccgttgcgaaaaagaacgttcacggcgactactgcacttatatacggttctcccccaccctcgggaaaaaggcggagccagtacacgacatcactttcccagtttaccccgcgccaccttctctaggcaccggatcaattgccgacccctccccccaacttctcggggactgtgggcgatgtgcgctctgccctagcagcgttttgggcttcccggtgttgcaagatgcttcatttgggttgtattacctgtccgtgggagctcaagcgtgaagttttaataataataataaccgctgatcagcctcgactgtgccttctagttgccagccatctgttgtttgcccctcccccgtgccttccttgaccctggaaggtgccactcccactgtcctttcctaataaaatgaggaaattgcatcgcattgtctgagtaggtgtcattctattctggggggtggggtggggcaggacagcaagggggaggattgggaagacaatagcaggcatgctggggatgcggtgggc

SEQ ID NO: 1006-1099 - skipped (94 entries)

SEQ ID NO: 1100 - protein, 867 aa, synthetic construct
MALPVTALLLPLALLLHAARPQVQLVQSGAEVKKPGASVKVSCKASGYSFPDYYINWVRQAPGQGLEWMGWIYFASGNSEYNQKFTGRVTMTRDTSSSTAYMELSSLRSEDTAVYFCASLYDYDWYFDVWGQGTMVTVSSGGGGSGGGGSGGGGSDIVMTQTPLSLSVTPGEPASISCKSSQSLVHSNGNTYLHWYLQKPGQSPQLLIYKVSNRFSGVPDRFSGSGSGADFTLKISRVEAEDVGVYYCAETSHVPWTFGQGTKLEIKTTTPAPRPPTPAPTIASQPLSLRPEACRPAAGGAVHTRGLDFACDIYIWAPLAGTCGVLLLSLVITLYCRSKRSRLLHSDYMNMTPRRPGPTRKHYQPYAPPRDFAAYRSRVKFSRSADAPAYQQGQNQLYNELNLGRREEYDVLDKRRGRDPEMGGKPRRKNPQEGLYNELQKDKMAEAYSEIGMKGERRRGKGHDGLYQGLSTATKDTYDALHMQALPPRGSGEGRGSLLTCGDVEENPGPMLLLVTSLLLCELPHPAFLLIPRKVCNGIGIGEFKDSLSINATNIKHFKNCTSISGDLHILPVAFRGDSFTHTPPLDPQELDILKTVKEITGFLLIQAWPENRTDLHAFENLEIIRGRTKQHGQFSLAVVSLNITSLGLRSLKEISDGDVIISGNKNLCYANTINWKKLFGTSGQKTKIISNRGENSCKATGQVCHALCSPEGCWGPEPRDCVSCRNVSRGRECVDKCNLLEGEPREFVENSECIQCHPECLPQAMNITCTGRGPDNCIQCAHYIDGPHCVKTCPAGVMGENNTLVWKYADAGHVCHLCHPNCTYGCTGPGLEGCPTNGPKIPSIATGMVGALLLLLVVALGIGLFM

SEQ ID NO: 1101 - protein, 45 aa, synthetic construct
TTTPAPRPPTPAPTIASQPLSLRPEACRPAAGGAVHTRGLDFACD

SEQ ID NO: 1102 - protein, 24 aa, synthetic construct
IYIWAPLAGTCGVLLLSLVITLYC

SEQ ID NO: 1103 - protein, 41 aa, synthetic construct
RSKRSRLLHSDYMNMTPRRPGPTRKHYQPYAPPRDFAAYRS

SEQ ID NO: 1104 - protein, 112 aa, synthetic construct
RVKFSRSADAPAYQQGQNQLYNELNLGRREEYDVLDKRRGRDPEMGGKPRRKNPQEGLYNELQKDKMAEAYSEIGMKGERRRGKGHDGLYQGLSTATKDTYDALHMQALPPR

SEQ ID NO: 1105 - skipped

SEQ ID NO: 1106 - protein, 18 aa, synthetic construct
EGRGSLLTCGDVEENPGP

SEQ ID NO: 1107 - protein, 239 aa, synthetic construct
MVSKGEELFTGVVPILVELDGDVNGHKFSVSGEGEGDATYGKLTLKFICTTGKLPVPWPTLVTTLTYGVQCFSRYPDHMKQHDFFKSAMPEGYVQERTIFFKDDGNYKTRAEVKFEGDTLVNRIELKGIDFKEDGNILGHKLEYNYNSHNVYIMADKQKNGIKVNFKIRHNIEDGSVQLADHYQQNTPIGDGPVLLPDNHYLSTQSALSKDPNEKRDHMVLLEFVTAAGITLGMDELYK

SEQ ID NO: 1108-1507 - skipped (400 entries)

SEQ ID NO: 1508 - DNA, 250 bp, Homo sapiens
  source 1..250: mol_type = genomic DNA
ccggtcccccccgccgggtccgcccccggggccgcggttccgcgcggcgcctcgcctcggccggcgcctagcagccgacttagaactggtgcggaccaggggaatccgactgtttaattaaaacaaagcatcgcgaaggcccgcggcgggtgttgacgcgatgtgatttctgcccagtgctctgaatgtcaaagtgaagaaattcaatgaagcgcgggtaaacggcgggagtaactatgactctcttaag

SEQ ID NO: 1509 - DNA, 250 bp, Homo sapiens
  source 1..250: mol_type = genomic DNA
gcggttccgcgcggcgcctcgcctcggccggcgcctagcagccgacttagaactggtgcggaccaggggaatccgactgtttaattaaaacaaagcatcgcgaaggcccgcggcgggtgttgacgcgatgtgatttctgcccagtgctctgaatgtcaaagtgaagaaattcaatgaagcgcgggtaaacggcgggagtaactatgactctcttaaggtagccaaatgcctcgtcatctaattagtgacg

SEQ ID NO: 1510 - DNA, 250 bp, Homo sapiens
  source 1..250: mol_type = genomic DNA
tcccccccgccgggtccgcccccggggccgcggttccgcgcggcgcctcgcctcggccggcgcctagcagccgacttagaactggtgcggaccaggggaatccgactgtttaattaaaacaaagcatcgcgaaggcccgcggcgggtgttgacgcgatgtgatttctgcccagtgctctgaatgtcaaagtgaagaaattcaatgaagcgcgggtaaacggcgggagtaactatgactctcttaaggtag

SEQ ID NO: 1511 - DNA, 250 bp, Homo sapiens
  source 1..250: mol_type = genomic DNA
cggcgcgctcgccggccgaggtgggatcccgaggcctctccagtccgccgagggcgcaccaccggcccgtctcgcccgccgcgccggggaggtggagcacgagcgcacgtgttaggacccgaaagatggtgaactatgcctgggcagggcgaagccagaggaaactctggtggaggtccgtagcggtcctgacgtgcaaatcggtcgtccgacctgggtataggggcgaaagactaatcgaaccatctag

SEQ ID NO: 1512 - DNA, 250 bp, Homo sapiens
  source 1..250: mol_type = genomic DNA
gcattcgtattgcgccgctagaggtgaaattcttggaccggcgcaagacggaccagagcgaaagcatttgccaagaatgttttcattaatcaagaacgaaagtcggaggttcgaagacgatcagataccgtcgtagttccgaccataaacgatgccgaccggcgatgcggcggcgttattcccatgacccgccgggcagcttccgggaaaccaaagtctttgggttccggggggagtatggttgcaaagc

SEQ ID NO: 1513 - DNA, 250 bp, Homo sapiens
  source 1..250: mol_type = genomic DNA
gtagccaaatgcctcgtcatctaattagtgacgcgcatgaatggatgaacgagattcccactgtccctacctactatccagcgaaaccacagccaagggaacgggcttggcggaatcagcggggaaagaagaccctgttgagcttgactctagtctggcacggtgaagagacatgagaggtgtagaataagtgggaggcccccggcgcccccccggtgtccccgcgaggggcccggggcggggtccgccg

SEQ ID NO: 1514 - DNA, 250 bp, Homo sapiens
  source 1..250: mol_type = genomic DNA
cgcatgaatggatgaacgagattcccactgtccctacctactatccagcgaaaccacagccaagggaacgggcttggcggaatcagcggggaaagaagaccctgttgagcttgactctagtctggcacggtgaagagacatgagaggtgtagaataagtgggaggcccccggcgcccccccggtgtccccgcgaggggcccggggcggggtccgccggccctgcgggccgccggtgaaataccactactc

SEQ ID NO: 1515 - DNA, 250 bp, Homo sapiens
  source 1..250: mol_type = genomic DNA
ccaaatgcctcgtcatctaattagtgacgcgcatgaatggatgaacgagattcccactgtccctacctactatccagcgaaaccacagccaagggaacgggcttggcggaatcagcggggaaagaagaccctgttgagcttgactctagtctggcacggtgaagagacatgagaggtgtagaataagtgggaggcccccggcgcccccccggtgtccccgcgaggggcccggggcggggtccgccggccc

SEQ ID NO: 1516 - DNA, 250 bp, Homo sapiens
  source 1..250: mol_type = genomic DNA
tagctggttccctccgaagtttccctcaggatagctggcgctctcgcagacccgacgcacccccgccacgcagttttatccggtaaagcgaatgattagaggtcttggggccgaaacgatctcaacctattctcaaactttaaatgggtaagaagcccggctcgctggcgtggagccgggcgtggaatgcgagtgcctagtgggccacttttggtaagcagaactggcgctgcgggatgaaccgaacgcc

SEQ ID NO: 1517 - DNA, 250 bp, Homo sapiens
  source 1..250: mol_type = genomic DNA
tgaaacttaaaggaattgacggaagggcaccaccaggagtggagcctgcggcttaatttgactcaacacgggaaacctcacccggcccggacacggacaggattgacagattgatagctctttctcgattccgtgggtggtggtgcatggccgttcttagttggtggagcgatttgtctggttaattccgataacgaacgagactctggcatgctaactagttacgcgacccccgagcggtcggcgtccc

SEQ ID NO: 1518 - DNA, 250 bp, Homo sapiens
  source 1..250: mol_type = genomic DNA
tagcagccgacttagaactggtgcggaccaggggaatccgactgtttaattaaaacaaagcatcgcgaaggcccgcggcgggtgttgacgcgatgtgatttctgcccagtgctctgaatgtcaaagtgaagaaattcaatgaagcgcgggtaaacggcgggagtaactatgactctcttaaggtagccaaatgcctcgtcatctaattagtgacgcgcatgaatggatgaacgagattcccactgtccct

SEQ ID NO: 1519 - DNA, 250 bp, Homo sapiens
  source 1..250: mol_type = genomic DNA
ccccccgccgggtccgcccccggggccgcggttccgcgcggcgcctcgcctcggccggcgcctagcagccgacttagaactggtgcggaccaggggaatccgactgtttaattaaaacaaagcatcgcgaaggcccgcggcgggtgttgacgcgatgtgatttctgcccagtgctctgaatgtcaaagtgaagaaattcaatgaagcgcgggtaaacggcgggagtaactatgactctcttaaggtagcc

SEQ ID NO: 1520 - DNA, 250 bp, Homo sapiens
  source 1..250: mol_type = genomic DNA
gcgcaagacggaccagagcgaaagcatttgccaagaatgttttcattaatcaagaacgaaagtcggaggttcgaagacgatcagataccgtcgtagttccgaccataaacgatgccgaccggcgatgcggcggcgttattcccatgacccgccgggcagcttccgggaaaccaaagtctttgggttccggggggagtatggttgcaaagctgaaacttaaaggaattgacggaagggcaccaccaggagt

SEQ ID NO: 1521 - DNA, 250 bp, Homo sapiens
  source 1..250: mol_type = genomic DNA
ggccgggcgcgacccgctccggggacagtgccaggtggggagtttgactggggcggtacacctgtcaaacggtaacgcaggtgtcctaaggcgagctcagggaggacagaaacctcccgtggagcagaagggcaaaagctcgcttgatcttgattttcagtacgaatacagaccgtgaaagcggggcctcacgatccttctgaccttttgggttttaagcaggaggtgtcagaaaagttaccacagggat

SEQ ID NO: 1522 - DNA, 19 bp, Homo sapiens
  source 1..19: mol_type = genomic DNA
gtctacggccataccaccc

SEQ ID NO: 1523 - DNA, 38 bp, Homo sapiens
  source 1..38: mol_type = genomic DNA
atcgcttctcggccttttggctaagatcaagtgtagta

SEQ ID NO: 1524 - DNA, 250 bp, Homo sapiens
  source 1..250: mol_type = genomic DNA
acctactatccagcgaaaccacagccaagggaacgggcttggcggaatcagcggggaaagaagaccctgttgagcttgactctagtctggcacggtgaagagacatgagaggtgtagaataagtgggaggcccccggcgcccccccggtgtccccgcgaggggcccggggcggggtccgccggccctgcgggccgccggtgaaataccactactctgatcgttttttcactgacccggtgaggcgggggg

SEQ ID NO: 1525 - DNA, 250 bp, Homo sapiens
  source 1..250: mol_type = genomic DNA
aaatgcctcgtcatctaattagtgacgcgcatgaatggatgaacgagattcccactgtccctacctactatccagcgaaaccacagccaagggaacgggcttggcggaatcagcggggaaagaagaccctgttgagcttgactctagtctggcacggtgaagagacatgagaggtgtagaataagtgggaggcccccggcgcccccccggtgtccccgcgaggggcccggggcggggtccgccggccctg

SEQ ID NO: 1526 - DNA, 250 bp, Homo sapiens
  source 1..250: mol_type = genomic DNA
ggagcctgcggcttaatttgactcaacacgggaaacctcacccggcccggacacggacaggattgacagattgatagctctttctcgattccgtgggtggtggtgcatggccgttcttagttggtggagcgatttgtctggttaattccgataacgaacgagactctggcatgctaactagttacgcgacccccgagcggtcggcgtcccccaacttcttagagggacaagtggcgttcagccacccgag

SEQ ID NO: 1527 - DNA, 250 bp, Homo sapiens
  source 1..250: mol_type = genomic DNA
aactggcttgtggcggccaagcgttcatagcgacgtcgctttttgatccttcgatgtcggctcttcctatcattgtgaagcagaattcaccaagcgttggattgttcacccactaatagggaacgtgagctgggtttagaccgtcgtgagacaggttagttttaccctactgatgatgtgttgttgccatggtaatcctgctcagtacgagaggaaccgcaggttcagacatttggtgtatgtgcttggc

SEQ ID NO: 1528 - DNA, 102 bp, Homo sapiens
  source 1..102: mol_type = genomic DNA
tgaacgcgcccgatctcgtctgatctcggaagctaagcagggtcgggcctggttagtacttggatgggagaccgcctgggaataccgggtgctgtaggcttt

SEQ ID NO: 1529 - DNA, 150 bp, Homo sapiens
  source 1..150: mol_type = genomic DNA
tctgttcttatcagtttaatatctgatacgtcctctatccgaggacaatatattaaatggatttttggagcagggagatggaataggagcttgctccgtccactccacgcatcgacctggtattgcagtacctccaggaacggtgcaccc

SEQ ID NO: 1530-1533 - skipped (4 entries)

SEQ ID NO: 1534 - protein, 5 aa, synthetic construct
EAAAK

SEQ ID NO: 1535 - protein, 5 aa, synthetic construct
GGGGS

SEQ ID NO: 1536 - protein, 4 aa, synthetic construct
GGGS

SEQ ID NO: 1537 - protein, 5 aa, synthetic construct
CPRSC

SEQ ID NO: 1538-3999 - skipped (2462 entries)

SEQ ID NO: 4000 - protein, 1381 aa, synthetic construct
MPAAKRVKLDGGDKKYSIGLDIGTNSVGWAVITDEYKVPSKKFKVLGNTDRHSIKKNLIGALLFDSGETAEATRLKRTARRRYTRRKNRICYLQEIFSNEMAKVDDSFFHRLEESFLVEEDKKHERHPIFGNIVDEVAYHEKYPTIYHLRKKLVDSTDKADLRLIYLALAHMIKFRGHFLIEGDLNPDNSDVDKLFIQLVQTYNQLFEENPINASGVDAKAILSARLSKSRRLENLIAQLPGEKKNGLFGNLIALSLGLTPNFKSNFDLAEDAKLQLSKDTYDDDLDNLLAQIGDQYADLFLAAKNLSDAILLSDILRVNTEITKAPLSASMIKRYDEHHQDLTLLKALVRQQLPEKYKEIFFDQSKNGYAGYIDGGASQEEFYKFIKPILEKMDGTEELLVKLNREDLLRKQRTFDNGSIPHQIHLGELHAILRRQEDFYPFLKDNREKIEKILTFRIPYYVGPLARGNSRFAWMTRKSEETITPWNFEEVVDKGASAQSFIERMTNFDKNLPNEKVLPKHSLLYEYFTVYNELTKVKYVTEGMRKPAFLSGEQKKAIVDLLFKTNRKVTVKQLKEDYFKKIECFDSVEISGVEDRFNASLGTYHDLLKIIKDKDFLDNEENEDILEDIVLTLTLFEDREMIEERLKTYAHLFDDKVMKQLKRRRYTGWGRLSRKLINGIRDKQSGKTILDFLKSDGFANRNFMQLIHDDSLTFKEDIQKAQVSGQGDSLHEHIANLAGSPAIKKGILQTVKVVDELVKVMGRHKPENIVIEMARENQTTQKGQKNSRERMKRIEEGIKELGSQILKEHPVENTQLQNEKLYLYYLQNGRDMYVDQELDINRLSDYDVDHIVPQSFLKDDSIDNKVLTRSDKARGKSDNVPSEEVVKKMKNYWRQLLNAKLITQRKFDNLTKAERGGLSELDKAGFIKRQLVETRQITKHVAQILDSRMNTKYDENDKLIREVKVITLKSKLVSDFRKDFQFYKVREINNYHHAHDAYLNAVVGTALIKKYPKLESEFVYGDYKVYDVRKMIAKSEQEIGKATAKYFFYSNIMNFFKTEITLANGEIRKRPLIETNGETGEIVWDKGRDFATVRKVLSMPQVNIVKKTEVQTGGFSKESILPKRNSDKLIARKKDWDPKKYGGFDSPTVAYSVLVVAKVEKGKSKKLKSVKELLGITIMERSSFEKNPIDFLEAKGYKEVKKDLIIKLPKYSLFELENGRKRMLASAGELQKGNELALPSKYVNFLYLASHYEKLKGSPEDNEQKQLFVEQHKHYLDEIIEQISEFSKRVILADANLDKVLSAYNKHRDKPIREQAENIIHLFTLTNLGAPAAFKYFDTTIDRKRYTSTKEVLDATLIHQSITGLYETRIDLSQLGGDGG

SEQ ID NO: 4001 - protein, 31 aa, synthetic construct
AGKRTADGSEFEKRTADGSEFESPKKKAKVE

SEQ ID NO: 4002 - protein, 2138 aa, synthetic construct
MPAAKRVKLDGGDKKYSIGLDIGTNSVGWAVITDEYKVPSKKFKVLGNTDRHSIKKNLIGALLFDSGETAEATRLKRTARRRYTRRKNRICYLQEIFSNEMAKVDDSFFHRLEESFLVEEDKKHERHPIFGNIVDEVAYHEKYPTIYHLRKKLVDSTDKADLRLIYLALAHMIKFRGHFLIEGDLNPDNSDVDKLFIQLVQTYNQLFEENPINASGVDAKAILSARLSKSRRLENLIAQLPGEKKNGLFGNLIALSLGLTPNFKSNFDLAEDAKLQLSKDTYDDDLDNLLAQIGDQYADLFLAAKNLSDAILLSDILRVNTEITKAPLSASMIKRYDEHHQDLTLLKALVRQQLPEKYKEIFFDQSKNGYAGYIDGGASQEEFYKFIKPILEKMDGTEELLVKLNREDLLRKQRTFDNGSIPHQIHLGELHAILRRQEDFYPFLKDNREKIEKILTFRIPYYVGPLARGNSRFAWMTRKSEETITPWNFEEVVDKGASAQSFIERMTNFDKNLPNEKVLPKHSLLYEYFTVYNELTKVKYVTEGMRKPAFLSGEQKKAIVDLLFKTNRKVTVKQLKEDYFKKIECFDSVEISGVEDRFNASLGTYHDLLKIIKDKDFLDNEENEDILEDIVLTLTLFEDREMIEERLKTYAHLFDDKVMKQLKRRRYTGWGRLSRKLINGIRDKQSGKTILDFLKSDGFANRNFMQLIHDDSLTFKEDIQKAQVSGQGDSLHEHIANLAGSPAIKKGILQTVKVVDELVKVMGRHKPENIVIEMARENQTTQKGQKNSRERMKRIEEGIKELGSQILKEHPVENTQLQNEKLYLYYLQNGRDMYVDQELDINRLSDYDVDHIVPQSFLKDDSIDNKVLTRSDKARGKSDNVPSEEVVKKMKNYWRQLLNAKLITQRKFDNLTKAERGGLSELDKAGFIKRQLVETRQITKHVAQILDSRMNTKYDENDKLIREVKVITLKSKLVSDFRKDFQFYKVREINNYHHAHDAYLNAVVGTALIKKYPKLESEFVYGDYKVYDVRKMIAKSEQEIGKATAKYFFYSNIMNFFKTEITLANGEIRKRPLIETNGETGEIVWDKGRDFATVRKVLSMPQVNIVKKTEVQTGGFSKESILPKRNSDKLIARKKDWDPKKYGGFDSPTVAYSVLVVAKVEKGKSKKLKSVKELLGITIMERSSFEKNPIDFLEAKGYKEVKKDLIIKLPKYSLFELENGRKRMLASAGELQKGNELALPSKYVNFLYLASHYEKLKGSPEDNEQKQLFVEQHKHYLDEIIEQISEFSKRVILADANLDKVLSAYNKHRDKPIREQAENIIHLFTLTNLGAPAAFKYFDTTIDRKRYTSTKEVLDATLIHQSITGLYETRIDLSQLGGDGGSGGSSGGSSGSETPGTSESATPESSGGSSGGSSGGTLNIEDEYRLHETSKEPDVSLGSTWLSDFPQAWAETGGMGLAVRQAPLIIPLKATSTPVSIKQYPMSQEARLGIKPHIQRLLDQGILVPCQSPWNTPLLPVKKPGTNDYRPVQDLREVNKRVEDIHPTVPNPYNLLSGLPPSHQWYTVLDLKDAFFCLRLHPTSQPLFAFEWRDPEMGISGQLTWTRLPQGFKNSPTLFNEALHRDLADFRIQHPDLILLQYVDDLLLAATSELDCQQGTRALLQTLGNLGYRASAKKAQICQKQVKYLGYLLKEGQRWLTEARKETVMGQPTPKTPRQLREFLGKAGFCRLFIPGFAEMAAPLYPLTKPGTLFNWGPDQQKAYQEIKQALLTAPALGLPDLTKPFELFVDEKQGYAKGVLTQKLGPWRRPVAYLSKKLDPVAAGWPPCLRMVAAIAVLTKDAGKLTMGQPLVILAPHAVEALVKQPPDRWLSNARMTHYQALLLDTDRVQFGPVVALNPATLLPLPEEGLQHNCLDILAEAHGTRPDLTDQPLPDADHTWYTDGSSLLQEGQRKAGAAVTTETEVIWAKALPAGTSAQRAELIALTQALKMAEGKKLNVYTDSRYAFATAHIHGEIYRRRGWLTSEGKEIKNKDEILALLKALFLPKRLSIIHCPGHQKGHSAEARGNRMADQAARKAAITETPDTSTLLIENSSPSGGSKRTADGSEFEAGKRTADGSEFEKRTADGSEFESPKKKAKVE

SEQ ID NO: 4003-5001 - skipped (999 entries)

SEQ ID NO: 5002 - protein, 672 aa, Murine leukemia virus
TLNIEDEYRLHETSKEPDVSLGSTWLSDFPQAWAETGGMGLAVRQAPLIIPLKATSTPVSIKQYPMSQEARLGIKPHIQRLLDQGILVPCQSPWNTPLLPVKKPGTNDYRPVQDLREVNKRVEDIHPTVPNPYNLLSGLPPSHQWYTVLDLKDAFFCLRLHPTSQPLFAFEWRDPEMGISGQLTWTRLPQGFKNSPTLFDEALHRDLADFRIQHPDLILLQYVDDLLLAATSELDCQQGTRALLQTLGNLGYRASAKKAQICQKQVKYLGYLLKEGQRWLTEARKETVMGQPTPKTPRQLREFLGTAGFCRLWIPGFAEMAAPLYPLTKTGTLFNWGPDQQKAYQEIKQALLTAPALGLPDLTKPFELFVDEKQGYAKGVLTQKLGPWRRPVAYLSKKLDPVAAGWPPCLRMVAAIAVLTKDAGKLTMGQPLVILAPHAVEALVKQPPDRWLSNARMTHYQALLLDTDRVQFGPVVALNPATLLPLPEEGLQHNCLDILAEAHGTRPDLTDQPLPDADHTWYTDGSSLLQEGQRKAGAAVTTETEVIWAKALPAGTSAQRAELIALTQALKMAEGKKLNVYTDSRYAFATAHIHGEIYRRRGLLTSEGKEIKNKDEILALLKALFLPKRLSIIHCPGHQKGHSAEARGNRMADQAARKAAITETPDTSTLLI

SEQ ID NO: 5003 - protein, 671 aa, Murine leukemia virus
TLNIEDEHRLHETSKEPDVSLGSTWLSDFPQAWAETGGMGLAVRQAPLIIPLKATSTPVSIKQYPMSQEARLGIKPHIQRLLDQGILVPCQSPWNTPLLPVKKPGTNDYRPVQDLREVNKRVEDIHPTVPNPYNLLSGLPPSHQWYTVLDLKDAFFCLRLHPTSQPLFAFEWRDPEMGISGQLTWTRLPQGFKNSPTLFDEALHRDLADFRIQHPDLILLQYVDDLLLAATSELDCQQGTRALLQTLGNLGYRASAKKAQICQKQVKYLGYLLKEGQRWLTEARKETVMGQPTPKTPRQLREFLGTAGFCRLWIPGFAEMAAPLYPLTKTGTLFNWGPDQQKAYQEIKQALLTAPALGLPDLTKPFELFVDEKQGYAKGVLTQKLGPWRRPVAYLSKKLDPVAAGWPPCLRMVAAIAVLTKDAGKLTMGQPLVILAPHAVEALVKQPPDRWLSNARMTHYQALLLDTDRVQFGPVVALNPATLLPLPEEGLQHNCLDILAEAHGTRPDLTDQPLPDADHTWYTDGSSLLQEGQRKAGAAVTTETEVIWAKALPAGTSAQRAELIALTQALKMAEGKKLNVYTDSRYAFATAHIHGEIYRRRGLLTSEGKEIKNKDEILALLKALFLPKRLSIIHCPGHQKGHSAEARGNRMADQAARKAAITETPDTSTLL

SEQ ID NO: 5004 - protein, 660 aa, Murine leukemia virus
TLNIEDEHRLHETSKEPDVSLGSTWLSDFPQAWAETGGMGLAVRQAPLIIPLKATSTPVSIKQYPMSQEARLGIKPHIQRLLDQGILVPCQSPWNTPLLPVKKPGTNDYRPVQDLREVNKRVEDIHPTVPNPYNLLSGLPPSHQWYTVLDLKDAFFCLRLHPTSQPLFAFEWRDPEMGISGQLTWTRLPQGFKNSPTLFDEALHRDLADFRIQHPDLILLQYVDDLLLAATSELDCQQGTRALLQTLGNLGYRASAKKAQICQKQVKYLGYLLKEGQRWLTEARKETVMGQPTPKTPRQLREFLGTAGFCRLWIPGFAEMAAPLYPLTKTGTLFNWGPDQQKAYQEIKQALLTAPALGLPDLTKPFELFVDEKQGYAKGVLTQKLGPWRRPVAYLSKKLDPVAAGWPPCLRMVAAIAVLTKDAGKLTMGQPLVILAPHAVEALVKQPPDRWLSNARMTHYQALLLDTDRVQFGPVVALNPATLLPLPEEGLQHNCLDILAEAHGTRPDLTDQPLPDADHTWYTDGSSLLQEGQRKAGAAVTTETEVIWAKALPAGTSAQRAELIALTQALKMAEGKKLNVYTDSRYAFATAHIHGEIYRRRGLLTSEGKEIKNKDEILALLKALFLPKRLSIIHCPGHQKGHSAEARGNRMADQAARKAA

SEQ ID NO: 5005 - protein, 672 aa, synthetic construct
TLNIEDEYRLHETSKEPDVSLGSTWLSDFPQAWAETGGMGLAVRQAPLIIPLKATSTPVSIKQYPMSQEARLGIKPHIQRLLDQGILVPCQSPWNTPLLPVKKPGTNDYRPVQDLREVNKRVEDIHPTVPNPYNLLSGLPPSHQWYTVLDLKDAFFCLRLHPTSQPLFAFEWRDPEMGISGQLTWTRLPQGFKNSPTLFNEALHRDLADFRIQHPDLILLQYVDDLLLAATSELDCQQGTRALLQTLGNLGYRASAKKAQICQKQVKYLGYLLKEGQRWLTEARKETVMGQPTPKTPRQLREFLGKAGFCRLFIPGFAEMAAPLYPLTKPGTLFNWGPDQQKAYQEIKQALLTAPALGLPDLTKPFELFVDEKQGYAKGVLTQKLGPWRRPVAYLSKKLDPVAAGWPPCLRMVAAIAVLTKDAGKLTMGQPLVILAPHAVEALVKQPPDRWLSNARMTHYQALLLDTDRVQFGPVVALNPATLLPLPEEGLQHNCLDILAEAHGTRPDLTDQPLPDADHTWYTDGSSLLQEGQRKAGAAVTTETEVIWAKALPAGTSAQRAELIALTQALKMAEGKKLNVYTDSRYAFATAHIHGEIYRRRGWLTSEGKEIKNKDEILALLKALFLPKRLSIIHCPGHQKGHSAEARGNRMADQAARKAAITETPDTSTLLI

SEQ ID NO: 5006 - protein, 33 aa, synthetic construct; identical to SEQ ID NO: 222

SEQ ID NO: 5007 - protein, 1369 aa, unidentified
SMDKKYSIGLAIGTNSVGWAVITDDYKVPSKKFKVLGNTDRHSIKKNLIGALLFDSGETAEATRLKRTARRRYTRRKNRICYLQEIFSNEMAKVDDSFFHRLEESFLVEEDKKHERHPIFGNIVDEVAYHEKYPTIYHLRKKLVDSTDKADLRLIYLALAHMIKFRGHFLIEGDLNPDNSDVDKLFIQLVQTYNQLFEENPINASGVDAKAILSARLSKSRRLENLIAQLPGEKKNGLFGNLIALSLGLTPNFKSNFDLAEDAKLQLSKDTYDDDLDNLLAQIGDQYADLFLAAKNLSDAILLSDILRVNTEITKAPLSASMIKRYDEHHQDLTLLKALVRQQLPEKYKEIFFDQSKNGYAGYIDGGASQEEFYKFIKPILEKMDGTEELLVKLNREDLLRKQRTFDNGSIPHQIHLGELHAILRRQEDFYPFLKDNREKIEKILTFRIPYYVGPLARGNSRFAWMTRKSEETITPWNFEEVVDKGASAQSFIERMTNFDKNLPNEKVLPKHSLLYEYFTVYNELTKVKYVTEGMRKPAFLSGEQKKAIVDLLFKTNRKVTVKQLKEDYFKKIECFDSVEISGVEDRFNASLGTYHDLLKIIKDKDFLDNEENEDILEDIVLTLTLFEDREMIEERLKTYAHLFDDKVMKQLKRRRYTGWGRLSRKLINGIRDKQSGKTILDFLKSDGFANRNFMQLIHDDSLTFKEDIQKAQVSGQGDSLHEHIANLAGSPAIKKGILQTVKVVDELVKVMGRHKPENIVIEMARENQTTQKGQKNSRERMKRIEEGIKELGSQILKEHPVENTQLQNEKLYLYYLQNGRDMYVDQELDINRLSDYDVDAIVPQSFLKDDSIDNKVLTRSDKNRGKSDNVPSEEVVKKMKNYWRQLLNAKLITQRKFDNLTKAERGGLSELDKAGFIKRQLVETRQITKHVAQILDSRMNTKYDENDKLIREVKVITLKSKLVSDFRKDFQFYKVREINNYHHAHDAYLNAVVGTALIKKYPKLESEFVYGDYKVYDVRKMIAKSEQEIGKATAKYFFYSNIMNFFKTEITLANGEIRKRPLIETNGETGEIVWDKGRDFATVRKVLSMPQVNIVKKTEVQTGGFSKESILPKRNSDKLIARKKDWDPKKYGGFDSPTVAYSVLVVAKVEKGKSKKLKSVKELLGITIMERSSFEKNPIDFLEAKGYKEVKKDLIIKLPKYSLFELENGRKRMLASAGELQKGNELALPSKYVNFLYLASHYEKLKGSPEDNEQKQLFVEQHKHYLDEIIEQISEFSKRVILADANLDKVLSAYNKHRDKPIREQAENIIHLFTLTNLGAPAAFKYFDTTIDRKRYTSTKEVLDATLIHQSITGLYETRIDLSQLGGD

SEQ ID NO: 5008 - DNA, 76 bp, synthetic construct
  source 1..76: mol_type = other DNA
gttttagagctagaaatagcaagttaaaataaggctagtccgttatcaacttgaaaaagtgggaccgagtcggtcc

SEQ ID NO: 5009-8002 - skipped (2994 entries)

SEQ ID NO: 8003 - protein, 673 aa, synthetic construct
TAPLEEEYRLFLEAPIQNVTLLEQWKREIPKVWAEINPPGLASTQAPIHVQLLSTALPVRVRQYPITLEAKRSLRETIRKFRAAGILRPVHSPWNTPLLPVRKSGTSEYRMVQDLREVNKRVETIHPTVPNPYTLLSLLPPDRIWYSVLDLKDAFFCIPLAPESQLIFAFEWADAEEGESGQLTWTRLPQGFKNSPTLFNEALNRDLQGFRLDHPSVSLLQYVDDLLIAADTQAACLSATRDLLMTLAELGYRVSGKKAQLCQEEVTYLGFKIHKGSRSLSNSRTQAILQIPVPKTKRQVREFLGKIGYCRLFIPGFAELAQPLYAATRPGNDPLVWGEKEEEAFQSLKLALTQPPALALPSLDKPFQLFVEETSGAAKGVLTQALGPWKRPVAYLSKRLDPVAAGWPRCLRAIAAAALLTREASKLTFGQDIEITSSHNLESLLRSPPDKWLTNARITQYQVLLLDPPRVRFKQTAALNPATLLPETDDTLPIHHCLDTLDSLTSTRPDLTDQPLAQAEATLFTDGSSYIRDGKRYAGAAVVTLDSVIWAEPLPIGTSAQKAELIALTKALEWSKDKSVNIYTDSRYAFATLHVHGMIYRERGWLTAGGKAIKNAPEILALLTAVWLPKRVAVMHCKGHQKDDAPTSTGNRRADEVAREVAIRPLSTQATIS

SEQ ID NO: 8004-8019 - skipped (16 entries)

SEQ ID NO: 8020 - protein, 670 aa, synthetic construct
TLQLEEEYRLFEPESTQKQEMDIWLKNFPQAWAETGGMGTAHCQAPVLIQLKATATPISIRQYPMPHEAYQGIKPHIRRMLDQGILKPCQSPWNTPLLPVKKPGTEDYRPVQDLREVNKRVEDIHPTVPNPYNLLSTLPPSHPWYTVLDLKDAFFCLRLHSESQLLFAFEWRDPEIGLSGQLTWTRLPQGFKNSPTLFNEALHSDLADFRVRYPALVLLQYVDDLLLAAATRTECLEGTKALLETLGNKGYRASAKKAQICLQEVTYLGYSLKDGQRWLTKARKEAILSIPVPKNSRQVREFLGKAGYCRLFIPGFAELAAPLYPLTRPGTLFQWGTEQQLAFEDIKKALLSSPALGLPDITKPFELFIDENSGFAKGVLVQKLGPWKRPVAYLSKKLDTVASGWPPCLRMVAAIAILVKDAGKLTLGQPLTILTSHPVEALVRQPPNKWLSNARMTHYQAMLLDAERVHFGPTVSLNPATLLPLPSGGNHHDCLQILAETHGTRPDLTDQPLPDADLTWYTDGSSFIRNGEREAGAAVTTESEVIWAAPLPPGTSAQRAELIALTQALKMAEGKKLTVYTDSRYAFATTHVHGEIYRRRGWLTSEGKEIKNKNEILALLEALFLPKRLSIIHCPGHQKGDSPQAKGNRLADDTAKKAATETHSSLTVLP

SEQ ID NO: 8021-8073 - skipped (53 entries)

SEQ ID NO: 8074 - protein, 671 aa, synthetic construct
TLNIEDEHRLHETSKEPDVSLGSTWLSDFPQAWAETGGMGLAVRQAPLIIPLKATSTPVSIKQYPMSQEARLGIKPHIQRLLDQGILVPCQSPWNTPLLPVKKPGTNDYRPVQDLREVNKRVEDIHPTVPNPYNLLSGLPPSHQWYTVLDLKDAFFCLRLHPTSQPLFAFEWRDPEMGISGQLTWTRLPQGFKNSPTLFNEALHRDLADFRIQHPDLILLQYVDDLLLAATSELDCQQGTRALLQTLGNLGYRASAKKAQICQKQVKYLGYLLKEGQRWLTEARKETVMGQPTPKTPRQLREFLGKAGFCRLFIPGFAEMAAPLYPLTKPGTLFNWGPDQQKAYQEIKQALLTAPALGLPDLTKPFELFVDEKQGYAKGVLTQKLGPWRRPVAYLSKKLDPVAAGWPPCLRMVAAIAVLTKDAGKLTMGQPLVILAPHAVEALVKQPPDRWLSNARMTHYQALLLDTDRVQFGPVVALNPATLLPLPEEGLQHNCLDILAEAHGTRPDLTDQPLPDADHTWYTDGSSLLQEGQRKAGAAVTTETEVIWAKALPAGTSAQRAELIALTQALKMAEGKKLNVYTDSRYAFATAHIHGEIYRRRGWLTSEGKEIKNKDEILALLKALFLPKRLSIIHCPGHQKGHSAEARGNRMADQAARKAAITETPDTSTLL

SEQ ID NO: 8075-8112 - skipped (38 entries)

SEQ ID NO: 8113 - protein, 751 aa, synthetic construct
MDPLQLLQPLEAEIKGTKLKAHWNSGATITCVPQAFLEEEVPIKNIWIKTIHGEKEQPVYYLTFKIQGRKVEAEVISSPYDYILVSPSDIPWLMKKPLQLTTLVPLQEYEERLLKQTMLTGSYKEKLQSLFLKYDALWQHWENQVGHRRIKPHHIATGTVNPRPQKQYPINPKAKASIQTVINDLLKQGVLIQQNSIMNTPVYPVPKPDGKWRMVLDYREVNKTIPLIAAQNQHSAGILSSIFRGKYKTTLDLSNGFWAHSITPESYWLTAFTWLGQQYCWTRLPQGFLNSPALFNADVVDLLKEVPNVQVYVDDIYISHDDPREHLEQLEKVFSLLLNAGYVVSLKKSEIAQHEVEFLGFNITKEGRGLTETFKQKLLNITPPRDLKQLQSILGKLNFARNFIPNFSELVKPLYNIIATAPGKYITWTTDNSQQLQNIISMLNSAENLEERNPEVRLIMKVNTSPSAGYIRFYNEFAKRPIMYLNYVYTKAEVKFTNTEKLLTTIHKGLIKALDLGMGQEILVYSPIVSMTKIQKTPLPERKALPIRWITWMSYLEDPRIQFHYDKTLPELQQVPTVTDDIIAKIKHPSEFSMVFYTDGSAIKHPNVNKSHNAGMGIAQVQFKPEFTVINTWSIPLGDHTAQLAEVAAVEFACKKALKIDGPVLIVTDSFYVAESVNKELPYWQSNGFFNNKKKPLKHVSKWKSIADCIQLKPDIIIIHEKGHQPTASTFHTEGNNLADKLATQGSYVVN

SEQ ID NO: 8114-9000 - skipped (887 entries)

SEQ ID NO: 9001 - protein, 1082 aa, Neisseria meningitidis
MAAFKPNPINYILGLDIGIASVGWAMVEIDEEENPIRLIDLGVRVFERAEVPKTGDSLAMARRLARSVRRLTRRRAHRLLRARRLLKREGVLQAADFDENGLIKSLPNTPWQLRAAALDRKLTPLEWSAVLLHLIKHRGYLSQRKNEGETADKELGALLKGVANNAHALQTGDFRTPAELALNKFEKESGHIRNQRGDYSHTFSRKDLQAELILLFEKQKEFGNPHVSGGLKEGIETLLMTQRPALSGDAVQKMLGHCTFEPAEPKAAKNTYTAERFIWLTKLNNLRILEQGSERPLTDTERATLMDEPYRKSKLTYAQARKLLGLEDTAFFKGLRYGKDNAEASTLMEMKAYHAISRALEKEGLKDKKSPLNLSSELQDEIGTAFSLFKTDEDITGRLKDRVQPEILEALLKHISFDKFVQISLKALRRIVPLMEQGKRYDEACAEIYGDHYGKKNTEEKIYLPPIPADEIRNPVVLRALSQARKVINGVVRRYGSPARIHIETAREVGKSFKDRKEIEKRQEENRKDREKAAAKFREYFPNFVGEPKSKDILKLRLYEQQHGKCLYSGKEINLVRLNEKGYVEIDHALPFSRTWDDSFNNKVLVLGSENQNKGNQTPYEYFNGKDNSREWQEFKARVETSRFPRSKKQRILLQKFDEDGFKECNLNDTRYVNRFLCQFVADHILLTGKGKRRVFASNGQITNLLRGFWGLRKVRAENDRHHALDAVVVACSTVAMQQKITRFVRYKEMNAFDGKTIDKETGKVLHQKTHFPQPWEFFAQEVMIRVFGKPDGKPEFEEADTPEKLRTLLAEKLSSRPEAVHEYVTPLFVSRAPNRKMSGAHKDTLRSAKRFVKHNEKISVKRVWLTEIKLADLENMVNYKNGREIELYEALKARLEAYGGNAKQAFDPKDNPFYKKGGQLVKAVRVEKTQESGVLLNKKNAYTIADNGDMVRVDVFCKVDKKGKNQYFIVPIYAWQVAENILPDIDCKGYRIDDSYTFCFSLHKYDLIAFQKDEKSKVEFAYYINCDSSNGRFYLAWHDKGSKEQQFRISTQNLVLIQKYQVNELGKEIRPCRLKKRPPVR

SEQ ID NO: 9002 - protein, 1055 aa, Pasteurella pneumotropica
MQNNPLNYILGLDLGIASIGWAVVEIDEESSPIRLIDVGVRTFERAEVAKTGESLALSRRLARSSRRLIKRRAERLKKAKRLLKAEKILHSIDEKLPINVWQLRVKGLKEKLERQEWAAVLLHLSKHRGYLSQRKNEGKSDNKELGALLSGIASNHQMLQSSEYRTPAEIAVKKFQVEEGHIRNQRGSYTHTFSRLDLLAEMELLFQRQAELGNSYTSTTLLENLTALLMWQKPALAGDAILKMLGKCTFEPSEYKAAKNSYSAERFVWLTKLNNLRILENGTERALNDNERFALLEQPYEKSKLTYAQVRAMLALSDNAIFKGVRYLGEDKKTVESKTTLIEMKFYHQIRKTLGSAELKKEWNELKGNSDLLDEIGTAFSLYKTDDDICRYLEGKLPERVLNALLENLNFDKFIQLSLKALHQILPLMLQGQRYDEAVSAIYGDHYGKKSTETTRLLPTIPADEIRNPVVLRTLTQARKVINAVVRLYGSPARIHIETAREVGKSYQDRKKLEKQQEDNRKQRESAVKKFKEMFPHFVGEPKGKDILKMRLYELQQAKCLYSGKSLELHRLLEKGYVEVDHALPFSRTWDDSFNNKVLVLANENQNKGNLTPYEWLDGKNNSERWQHFVVRVQTSGFSYAKKQRILNHKLDEKGFIERNLNDTRYVARFLCNFIADNMLLVGKGKRNVFASNGQITALLRHRWGLQKVREQNDRHHALDAVVVACSTVAMQQKITRFVRYNEGNVFSGERIDRETGEIIPLHFPSPWAFFKENVEIRIFSENPKLELENRLPDYPQYNHEWVQPLFVSRMPTRKMTGQGHMETVKSAKRLNEGLSVLKVPLTQLKLSDLERMVNRDREIALYESLKARLEQFGNDPAKAFAEPFYKKGGALVKAVRLEQTQKSGVLVRDGNGVADNASMVRVDVFTKGGKYFLVPIYTWQVAKGILPNRAATQGKDENDWDIMDEMATFQFSLCQNDLIKLVTKKKTIFGYFNGLNRATSNINIKEHDLDKSKGKLGIYLEVGVKLAISLEKYQVDELGKNIRPCRPTKRQHVR

SEQ ID NO: 9003 - protein, 1053 aa, Staphylococcus aureus
MKRNYILGLDIGITSVGYGIIDYETRDVIDAGVRLFKEANVENNEGRRSKRGARRLKRRRRHRIQRVKKLLFDYNLLTDHSELSGINPYEARVKGLSQKLSEEEFSAALLHLAKRRGVHNVNEVEEDTGNELSTKEQISRNSKALEEKYVAELQLERLKKDGEVRGSINRFKTSDYVKEAKQLLKVQKAYHQLDQSFIDTYIDLLETRRTYYEGPGEGSPFGWKDIKEWYEMLMGHCTYFPEELRSVKYAYNADLYNALNDLNNLVITRDENEKLEYYEKFQIIENVFKQKKKPTLKQIAKEILVNEEDIKGYRVTSTGKPEFTNLKVYHDIKDITARKEIIENAELLDQIAKILTIYQSSEDIQEELTNLNSELTQEEIEQISNLKGYTGTHNLSLKAINLILDELWHTNDNQIAIFNRLKLVPKKVDLSQQKEIPTTLVDDFILSPVVKRSFIQSIKVINAIIKKYGLPNDIIIELAREKNSKDAQKMINEMQKRNRQTNERIEEIIRTTGKENAKYLIEKIKLHDMQEGKCLYSLEAIPLEDLLNNPFNYEVDHIIPRSVSFDNSFNNKVLVKQEENSKKGNRTPFQYLSSSDSKISYETFKKHILNLAKGKGRISKTKKEYLLEERDINRFSVQKDFINRNLVDTRYATRGLMNLLRSYFRVNNLDVKVKSINGGFTSFLRRKWKFKKERNKGYKHHAEDALIIANADFIFKEWKKLDKAKKVMENQMFEEKQAESMPEIETEQEYKEIFITPHQIKHIKDFKDYKYSHRVDKKPNRELINDTLYSTRKDDKGNTLIVNNLNGLYDKDNDKLKKLINKSPEKLLMYHHDPQTYQKLKLIMEQYGDEKNPLYKYYEETGNYLTKYSKKDNGPVIKKIKYYGNKLNAHLDITDDYPNSRNKVVKLSLKPYRFDVYLDNGVYKFVTVKNLDVIKKENYYEVNSKCYEEAKKLKKISNQAEFIASFYNNDLIKINGELYRVIGVNNDLLNRIEVNMIDITYREYLENMNDKRPPRIIKTIASKTQSIKKYSTDILGNLYEVKSKKHPQIIKKG

SEQ ID NO: 9004 - protein, 1053 aa, Staphylococcus aureus
MKRNYILGLDIGITSVGYGIIDYETRDVIDAGVRLFKEANVENNEGRRSKRGARRLKRRRRHRIQRVKKLLFDYNLLTDHSELSGINPYEARVKGLSQKLSEEEFSAALLHLAKRRGVHNVNEVEEDTGNELSTKEQISRNSKALEEKYVAELQLERLKKDGEVRGSINRFKTSDYVKEAKQLLKVQKAYHQLDQSFIDTYIDLLETRRTYYEGPGEGSPFGWKDIKEWYEMLMGHCTYFPEELRSVKYAYNADLYNALNDLNNLVITRDENEKLEYYEKFQIIENVFKQKKKPTLKQIAKEILVNEEDIKGYRVTSTGKPEFTNLKVYHDIKDITARKEIIENAELLDQIAKILTIYQSSEDIQEELTNLNSELTQEEIEQISNLKGYTGTHNLSLKAINLILDELWHTNDNQIAIFNRLKLVPKKVDLSQQKEIPTTLVDDFILSPVVKRSFIQSIKVINAIIKKYGLPNDIIIELAREKNSKDAQKMINEMQKRNRQTNERIEEIIRTTGKENAKYLIEKIKLHDMQEGKCLYSLEAIPLEDLLNNPFNYEVDHIIPRSVSFDNSFNNKVLVKQEENSKKGNRTPFQYLSSSDSKISYETFKKHILNLAKGKGRISKTKKEYLLEERDINRFSVQKDFINRNLVDTRYATRGLMNLLRSYFRVNNLDVKVKSINGGFTSFLRRKWKFKKERNKGYKHHAEDALIIANADFIFKEWKKLDKAKKVMENQMFEEKQAESMPEIETEQEYKEIFITPHQIKHIKDFKDYKYSHRVDKKPNRKLINDTLYSTRKDDKGNTLIVNNLNGLYDKDNDKLKKLINKSPEKLLMYHHDPQTYQKLKLIMEQYGDEKNPLYKYYEETGNYLTKYSKKDNGPVIKKIKYYGNKLNAHLDITDDYPNSRNKVVKLSLKPYRFDVYLDNGVYKFVTVKNLDVIKKENYYEVNSKCYEEAKKLKKISNQAEFIASFYKNDLIKINGELYRVIGVNNDLLNRIEVNMIDITYREYLENMNDKRPPHIIKTIASKTQSIKKYSTDILGNLYEVKSKKHPQIIKKG

SEQ ID NO: 9005 - protein, 1061 aa, Staphylococcus auricularis
MQENQQKQNYILGLDIGITSVGYGLIDSKTREVIDAGVRLFPEADSENNSNRRSKRGARRLKRRRIHRLNRVKDLLADYQMIDLNNVPKSTDPYTIRVKGLREPLTKEEFAIALLHIAKRRGLHNISVSMGDEEQDNELSTKQQLQKNAQQLQDKYVCELQLERLTNINKVRGEKNRFKTEDFVKEVKQLCETQRQYHNIDDQFIQQYIDLVSTRREYFEGPGNGSPYGWDGDLLKWYEKLMGRCTYFPEELRSVKYAYSADLFNALNDLNNLVVTRDDNPKLEYYEKYHIIENVFKQKKNPTLKQIAKEIGVQDYDIRGYRITKSGKPQFTSFKLYHDLKNIFEQAKYLEDVEMLDEIAKILTIYQDEISIKKALDQLPELLTESEKSQIAQLTGYTGTHRLSLKCIHIVIDELWESPENQMEIFTRLNLKPKKVEMSEIDSIPTTLVDEFILSPVVKRAFIQSIKVINAVINRFGLPEDIIIELAREKNSKDRRKFINKLQKQNEATRKKIEQLLAKYGNTNAKYMIEKIKLHDMQEGKCLYSLEAIPLEDLLSNPTHYEVDHIIPRSVSFDNSLNNKVLVKQSENSKKGNRTPYQYLSSNESKISYNQFKQHILNLSKAKDRISKKKRDMLLEERDINKFEVQKEFINRNLVDTRYATRELSNLLKTYFSTHDYAVKVKTINGGFTNHLRKVWDFKKHRNHGYKHHAEDALVIANADFLFKTHKALRRTDKILEQPGLEVNDTTVKVDTEEKYQELFETPKQVKNIKQFRDFKYSHRVDKKPNRQLINDTLYSTREIDGETYVVQTLKDLYAKDNEKVKKLFTERPQKILMYQHDPKTFEKLMTILNQYAEAKNPLAAYYEDKGEYVTKYAKKGNGPAIHKIKYIDKKLGSYLDVSNKYPETQNKLVKLSLKSFRFDIYKCEQGYKMVSIGYLDVLKKDNYYYIPKDKYEAEKQKKKIKESDLFVGSFYYNDLIMYEDELFRVIGVNSDINNLVELNMVDITYKDFCEVNNVTGEKRIKKTIGKRVVLIEKYTTDILGNLYKTPLPKKPQLIFKRGEL

SEQ ID NO: 9006 - protein, 1061 aa, Staphylococcus auricularis
MQENQQKQNYILGLDIGITSVGYGLIDSKTREVIDAGVRLFPEADSENNSNRRSKRGARRLKRRRIHRLNRVKDLLADYQMIDLNNVPKSTDPYTIRVKGLREPLTKEEFAIALLHIAKRRGLHNISVSMGDEEQDNELSTKQQLQKNAQQLQDKYVCELQLERLTNINKVRGEKNRFKTEDFVKEVKQLCETQRQYHNIDDQFIQQYIDLVSTRREYFEGPGNGSPYGWDGDLLKWYEKLMGRCTYFPEELRSVKYAYSADLFNALNDLNNLVVTRDDNPKLEYYEKYHIIENVFKQKKNPTLKQIAKEIGVQDYDIRGYRITKSGKPQFTSFKLYHDLKNIFEQAKYLEDVEMLDEIAKILTIYQDEISIKKALDQLPELLTESEKSQIAQLTGYTGTHRLSLKCIHIVIDELWESPENQMEIFTRLNLKPKKVEMSEIDSIPTTLVDEFILSPVVKRAFIQSIKVINAVINRFGLPEDIIIELAREKNSKDRRKFINKLQKQNEATRKKIEQLLAKYGNTNAKYMIEKIKLHDMQEGKCLYSLEAIPLEDLLSNPTHYEVDHIIPRSVSFDNSLNNKVLVKQSENSKKGNRTPYQYLSSNESKISYNQFKQHILNLSKAKDRISKKKRDMLLEERDINKFEVQKEFINRNLVDTRYATRELSNLLKTYFSTHDYAVKVKTINGGFTNHLRKVWDFKKHRNHGYKHHAEDALVIANADFLFKTHKALRRTDKILEQPGLEVNDTTVKVDTEEKYQELFETPKQVKNIKQFRDFKYSHRVDKKPNRKLINDTLYSTREIDGETYVVQTLKDLYAKDNEKVKKLFTERPQKILMYQHDPKTFEKLMTILNQYAEAKNPLAAYYEDKGEYVTKYAKKGNGPAIHKIKYIDKKLGSYLDVSNKYPETQNKLVKLSLKSFRFDIYKCEQGYKMVSIGYLDVLKKDNYYYIPKDKYEAEKQKKKIKESDLFVGSFYKNDLIMYEDELFRVIGVNSDINNLVELNMVDITYKDFCEVNNVTGEKHIKKTIGKRVVLIEKYTTDILGNLYKTPLPKKPQLIFKRGEL

SEQ ID NO: 9007 - protein, 1375 aa, Streptococcus canis
MEKKYSIGLDIGTNSVGWAVITDDYKVPSKKFKVLGNTNRKSIKKNLMGALLFDSGETAEATRLKRTARRRYTRRKNRIRYLQEIFANEMAKLDDSFFQRLEESFLVEEDKKNERHPIFGNLADEVAYHRNYPTIYHLRKKLADSPEKADLRLIYLALAHIIKFRGHFLIEGKLNAENSDVAKLFYQLIQTYNQLFEESPLDEIEVDAKGILSARLSKSKRLEKLIAVFPNEKKNGLFGNIIALALGLTPNFKSNFDLTEDAKLQLSKDTYDDDLDELLGQIGDQYADLFSAAKNLSDAILLSDILRSNSEVTKAPLSASMVKRYDEHHQDLALLKTLVRQQFPEKYAEIFKDDTKNGYAGYVGADKKLRKRSGKLATEEEFYKFIKPILEKMDGAEELLAKLNRDDLLRKQRTFDNGSIPHQIHLKELHAILRRQEEFYPFLKENREKIEKILTFRIPYYVGPLARGNSRFAWLTRKSEEAITPWNFEEVVDKGASAQSFIERMTNFDEQLPNKKVLPKHSLLYEYFTVYNELTKVKYVTERMRKPEFLSGEQKKAIVDLLFKTNRKVTVKQLKEDYFKKIECFDSVEIIGVEDRFNASLGTYHDLLKIIKDKDFLDNEENEDILEDIVLTLTLFEDREMIEERLKTYAHLFDDKVMKQLKRRHYTGWGRLSRKMINGIRDKQSGKTILDFLKSDGFSNRNFMQLIHDDSLTFKEEIEKAQVSGQGDSLHEQIADLAGSPAIKKGILQTVKIVDELVKVMGHKPENIVIEMARENQTTTKGLQQSRERKKRIEEGIKELESQILKENPVENTQLQNEKLYLYYLQNGRDMYVDQELDINRLSDYDVDHIVPQSFIKDDSIDNKVLTRSVENRGKSDNVPSEEVVKKMKNYWRQLLNAKLITQRKFDNLTKAERGGLSEADKAGFIKRQLVETRQITKHVARILDSRMNTKRDKNDKPIREVKVITLKSKLVSDFRKDFQLYKVRDINNYHHAHDAYLNAVVGTALIKKYPKLESEFVYGDYKVYDVRKMIAKSEQEIGKATAKRFFYSNIMNFFKTEVKLANGEIRKRPLIETNGETGEVVWNKEKDFATVRKVLAMPQVNIVKKTEVQTGGFSKESILSKRESAKLIPRKKGWDTRKYGGFGSPTVAYSILVVAKVEKGKAKKLKSVKVLVGITIMEKGSYEKDPIGFLEAKGYKDIKKELIFKLPKYSLFELENGRRRMLASAKELQKANELVLPQHLVRLLYYTQNISATTGSNNLGYIEQHREEFKEIFEKIIDFSEKYILKNKVNSNLKSSFDEQFAVSDSILLSNSFVSLLKYTSFGASGGFTFLDLDVKQGRLRYQTVTEVLDATLIYQSITGLYETRTDLSQLGGD

SEQ ID NO: 9008 - protein, 1368 aa, Streptococcus pyogenes [sequence omitted]

SEQ ID NO: 9009 - protein, 1368 aa, Streptococcus pyogenes
MDKKYSIGLDIGTNSVGWAVITDEYKVPSKKFKVLGNTDRHSIKKNLIGALLFDSGETAEATRLKRTARRRYTRRKNRICYLQEIFSNEMAKVDDSFFHRLEESFLVEEDKKHERHPIFGNIVDEVAYHEKYPTIYHLRKKLVDSTDKADLRLIYLALAHMIKFRGHFLIEGDLNPDNSDVDKLFIQLVQTYNQLFEENPINASGVDAKAILSARLSKSRRLENLIAQLPGEKKNGLFGNLIALSLGLTPNFKSNFDLAEDAKLQLSKDTYDDDLDNLLAQIGDQYADLFLAAKNLSDAILLSDILRVNTEITKAPLSASMIKRYDEHHQDLTLLKALVRQQLPEKYKEIFFDQSKNGYAGYIDGGASQEEFYKFIKPILEKMDGTEELLVKLNREDLLRKQRTFDNGSIPHQIHLGELHAILRRQEDFYPFLKDNREKIEKILTFRIPYYVGPLARGNSRFAWMTRKSEETITPWNFEEVVDKGASAQSFIERMTNFDKNLPNEKVLPKHSLLYEYFTVYNELTKVKYVTEGMRKPAFLSGEQKKAIVDLLFKTNRKVTVKQLKEDYFKKIECFDSVEISGVEDRFNASLGTYHDLLKIIKDKDFLDNEENEDILEDIVLTLTLFEDREMIEERLKTYAHLFDDKVMKQLKRRRYTGWGRLSRKLINGIRDKQSGKTILDFLKSDGFANRNFMQLIHDDSLTFKEDIQKAQVSGQGDSLHEHIANLAGSPAIKKGILQTVKVVDELVKVMGRHKPENIVIEMARENQTTQKGQKNSRERMKRIEEGIKELGSQILKEHPVENTQLQNEKLYLYYLQNGRDMYVDQELDINRLSDYDVDHIVPQSFLKDDSIDNKVLTRSDKNRGKSDNVPSEEVVKKMKNYWRQLLNAKLITQRKFDNLTKAERGGLSELDKAGFIKRQLVETRQITKHVAQILDSRMNTKYDENDKLIREVKVITLKSKLVSDFRKDFQFYKVREINNYHHAHDAYLNAVVGTALIKKYPKLESEFVYGDYKVYDVRKMIAKSEQEIGKATAKYFFYSNIMNFFKTEITLANGEIRKRPLIETNGETGEIVWDKGRDFATVRKVLSMPQVNIVKKTEVQTGGFSKESIRPKRNSDKLIARKKDWDPKKYGGFVSPTVAYSVLVVAKVEKGKSKKLKSVKELLGITIMERSSFEKNPIDFLEAKGYKEVKKDLIIKLPKYSLFELENGRKRMLASARFLQKGNELALPSKYVNFLYLASHYEKLKGSPEDNEQKQLFVEQHKHYLDEIIEQISEFSKRVILADANLDKVLSAYNKHRDKPIREQAENIIHLFTLTNLGAPRAFKYFDTTIDRKVYRSTKEVLDATLIHQSITGLYETRIDLSQLGGD

SEQ ID NO: 9010 - protein, 1368 aa, Streptococcus pyogenes
MDKKYSIGLDIGTNSVGWAVITDEYKVPSKKFKVLGNTDRHSIKKNLIGALLFDSGETAERTRLKRTARRRYTRRKNRICYLQEIFSNEMAKVDDSFFHRLEESFLVEEDKKHERHPIFGNIVDEVAYHEKYPTIYHLRKKLVDSTDKADLRLIYLALAHMIKFRGHFLIEGDLNPDNSDVDKLFIQLVQTYNQLFEENPINASGVDAKAILSARLSKSRRLENLIAQLPGEKKNGLFGNLIALSLGLTPNFKSNFDLAEDAKLQLSKDTYDDDLDNLLAQIGDQYADLFLAAKNLSDAILLSDILRVNTEITKAPLSASMIKRYDEHHQDLTLLKALVRQQLPEKYKEIFFDQSKNGYAGYIDGGASQEEFYKFIKPILEKMDGTEELLVKLNREDLLRKQRTFDNGSIPHQIHLGELHAILRRQEDFYPFLKDNREKIEKILTFRIPYYVGPLARGNSRFAWMTRKSEETITPWNFEEVVDKGASAQSFIERMTNFDKNLPNEKVLPKHSLLYEYFTVYNELTKVKYVTEGMRKPAFLSGEQKKAIVDLLFKTNRKVTVKQLKEDYFKKIECFDSVEISGVEDRFNASLGTYHDLLKIIKDKDFLDNEENEDILEDIVLTLTLFEDREMIEERLKTYAHLFDDKVMKQLKRRRYTGWGRLSRKLINGIRDKQSGKTILDFLKSDGFANRNFMQLIHDDSLTFKEDIQKAQVSGQGDSLHEHIANLAGSPAIKKGILQTVKVVDELVKVMGRHKPENIVIEMARENQTTQKGQKNSRERMKRIEEGIKELGSQILKEHPVENTQLQNEKLYLYYLQNGRDMYVDQELDINRLSDYDVDHIVPQSFLKDDSIDNKVLTRSDKNRGKSDNVPSEEVVKKMKNYWRQLLNAKLITQRKFDNLTKAERGGLSELDKAGFIKRQLVETRQITKHVAQILDSRMNTKYDENDKLIREVKVITLKSKLVSDFRKDFQFYKVREINNYHHAHDAYLNAVVGTALIKKYPKLESEFVYGDYKVYDVRKMIAKSEQEIGKATAKYFFYSNIMNFFKTEITLANGEIRKRPLIETNGETGEIVWDKGRDFATVRKVLSMPQVNIVKKTEVQTGGFSKESIRPKRNSDKLIARKKDWDPKKYGGFLWPTVAYSVLVVAKVEKGKSKKLKSVKELLGITIMERSSFEKNPIDFLEAKGYKEVKKDLIIKLPKYSLFELENGRKRMLASAKQLQKGNELALPSKYVNFLYLASHYEKLKGSPEDNEQKQLFVEQHKHYLDEIIEQISEFSKRVILADANLDKVLSAYNKHRDKPIREQAENIIHLFTLTRLGAPRAFKYFDTTIDPKQYRSTKEVLDATLIHQSITGLYETRIDLSQLGGD

SEQ ID NO: 9011 - protein, 1121 aa, Streptococcus thermophilus
MSDLVLGLDIGIGSVGVGILNKVTGEIIHKNSRIFPAAQAENNLVRRTNRQGRRLARRKKHRRVRLNRLFEESGLITDFTKISINLNPYQLRVKGLTDELSNEELFIALKNMVKHRGISYLDDASDDGNSSVGDYAQIVKENSKQLETKTPGQIQLERYQTYGQLRGDFTVEKDGKKHRLINVFPTSAYRSEALRILQTQQEFNPQITDEFINRYLEILTGKRKYYHGPGNEKSRTDYGRYRTSGETLDNIFGILIGKCTFYPDEFRAAKASYTAQEFNLLNDLNNLTVPTETKKLSKEQKNQIINYVKNEKAMGPAKLFKYIAKLLSCDVADIKGYRIDKSGKAEIHTFEAYRKMKTLETLDIEQMDRETLDKLAYVLTLNTEREGIQEALEHEFADGSFSQKQVDELVQFRKANSSIFGKGWHNFSVKLMMELIPELYETSEEQMTILTRLGKQKTTSSSNKTKYIDEKLLTEEIYNPVVAKSVRQAIKIVNAAIKEYGDFDNIVIEMARETNEDDEKKAIQKIQKANKDEKDAAMLKAANQYNGKAELPHSVFHGHKQLATKIRLWHQQGERCLYTGKTISIHDLINNSNQFEVDHILPLSITFDDSLANKVLVYATANQEKGQRTPYQALDSMDDAWSFRELKAFVRESKTLSNKKKEYLLTEEDISKFDVRKKFIERNLVDTRYASRVVLNALQEHFRAHKIDTKVSVVRGQFTSQLRRHWGIEKTRDTYHHHAVDALIIAASSQLNLWKKQKNTLVSYSEDQLLDIETGELISDDEYKESVFKAPYQHFVDTLKSKEFEDSILFSYQVDSKFNRKISDATIYATRQAKVGKDKADETYVLGKIKDIYTQDGYDAFMKIYKKDKSKFLMYRHDPQTFEKVIEPILENYPNKQINEKGKEVPCNPFLKYKEEHGYIRKYSKKGNGPEIKSLKYYDSKLGNHIDITPKDSNNKVVLQSVSPWRADVYFNKTTGKYEILGLKYADLQFEKGTGTYKISQEKYNDIKKKEGVDSDSEFKFTLYKNDLLLVKDTETKEQQLFRFLSRTMPKQKHYVELKPYDKQKFEGGEALIKVLGNVANSGQCKKGLGKSNISIYKVRTDVLGNQHIIKNEGDKPKLDF

SEQ ID NO: 9012 - protein, 1092 aa, Brevibacillus laterosporus
MAYTMGIDVGIASCGWAIVDLERQRIIDIGVRTFEKAENPKNGEALAVPRREARSSRRRLRRKKHRIERLKHMFVRNGLAVDIQHLEQTLRSQNEIDVWQLRVDGLDRMLTQKEWLRVLIHLAQRRGFQSNRKTDGSSEDGQVLVNVTENDRLMEEKDYRTVAEMMVKDEKFSDHKRNKNGNYHGVVSRSSLLVEIHTLFETQRQHHNSLASKDFELEYVNIWSAQRPVATKDQIEKMIGTCTFLPKEKRAPKASWHFQYFMLLQTINHIRITNVQGTRSLNKEEIEQVVNMALTKSKVSYHDTRKILDLSEEYQFVGLDYGKEDEKKKVESKETIIKLDDYHKLNKIFNEVELAKGETWEADDYDTVAYALTFFKDDEDIRDYLQNKYKDSKNRLVKNLANKEYTNELIGKVSTLSFRKVGHLSLKALRKIIPFLEQGMTYDKACQAAGFDFQGISKKKRSVVLPVIDQISNPVVNRALTQTRKVINALIKKYGSPETIHIETARELSKTFDERKNITKDYKENRDKNEHAKKHLSELGIINPTGLDIVKYKLWCEQQGRCMYSNQPISFERLKESGYTEVDHIIPYSRSMNDSYNNRVLVMTRENREKGNQTPFEYMGNDTQRWYEFEQRVTTNPQIKKEKRQNLLLKGFTNRRELEMLERNLNDTRYITKYLSHFISTNLEFSPSDKKKKVVNTSGRITSHLRSRWGLEKNRGQNDLHHAMDAIVIAVTSDSFIQQVTNYYKRKERRELNGDDKFPLPWKFFREEVIARLSPNPKEQIEALPNHFYSEDELADLQPIFVSRMPKRSITGEAHQAQFRRVVGKTKEGKNITAKKTALVDISYDKNGDFNMYGRETDPATYEAIKERYLEFGGNVKKAFSTDLHKPKKDGTKGPLIKSVRIMENKTLVHPVNKGKGVVYNSSIVRTDVFQRKEKYYLLPVYVTDVTKGKLPNKVIVAKKGYHDWIEVDDSFTFLFSLYPNDLIFIRQNPKKKISLKKRIESHSISDSKEVQEIHAYYKGVDSSTAAIEFIIHDGSYYAKGVGVQNLDCFEKYQVDILGNYFKVKGEKRLELETSDSNHKGKDVNSIKSTSR

SEQ ID NO: 9013 - protein, 1053 aa, Staphylococcus aureus
MKRNYILGLDIGITSVGYGIIDYETRDVIDAGVRLFKEANVENNEGRRSKRGARRLKRRRRHRIQRVKKLLFDYNLLTDHSELSGINPYEARVKGLSQKLSEEEFSAALLHLAKRRGVHNVNEVEEDTGNELSTKEQISRNSKALEEKYVAELQLERLKKDGEVRGSINRFKTSDYVKEAKQLLKVQKAYHQLDQSFIDTYIDLLETRRTYYEGPGEGSPFGWKDIKEWYEMLMGHCTYFPEELRSVKYAYNADLYNALNDLNNLVITRDENEKLEYYEKFQIIENVFKQKKKPTLKQIAKEILVNEEDIKGYRVTSTGKPEFTNLKVYHDIKDITARKEIIENAELLDQIAKILTIYQSSEDIQEELTNLNSELTQEEIEQISNLKGYTGTHNLSLKAINLILDELWHTNDNQIAIFNRLKLVPKKVDLSQQKEIPTTLVDDFILSPVVKRSFIQSIKVINAIIKKYGLPNDIIIELAREKNSKDAQKMINEMQKRNRQTNERIEEIIRTTGKENAKYLIEKIKLHDMQEGKCLYSLEAIPLEDLLNNPFNYEVDHIIPRSVSFDNSFNNKVLVKQEENSKKGNRTPFQYLSSSDSKISYETFKKHILNLAKGKGRISKTKKEYLLEERDINRFSVQKDFINRNLVDTRYATRGLMNLLRSYFRVNNLDVKVKSINGGFTSFLRRKWKFKKERNKGYKHHAEDALIIANADFIFKEWKKLDKAKKVMENQMFEEKQAESMPEIETEQEYKEIFITPHQIKHIKDFKDYKYSHRVDKKPNRKLINDTLYSTRKDDKGNTLIVNNLNGLYDKDNDKLKKLINKSPEKLLMYHHDPQTYQKLKLIMEQYGDEKNPLYKYYEETGNYLTKYSKKDNGPVIKKIKYYGNKLNAHLDITDDYPNSRNKVVKLSLKPYRFDVYLDNGVYKFVTVKNLDVIKKENYYEVNSKCYEEAKKLKKISNQAEFIASFYKNDLIKINGELYRVIGVNSDKNNLIEVNMIDITYREYLENMNDKRPPHIIKTIASKTQSIKKYSTDILGNLYEVKSKKHPQIIKKG

SEQ ID NO: 9014 - protein, 1053 aa, Staphylococcus aureus
MKRNYILGLDIGITSVGYGIIDYETRDVIDAGVRLFKEANVENNEGRRSKRGARRLKRRRRHRIQRVKKLLFDYNLLTDHSELSGINPYEARVKGLSQKLSEEEFSAALLHLAKRRGVHNVNEVEEDTGNELSTKEQISRNSKALEEKYVAELQLERLKKDGEVRGSINRFKTSDYVKEAKQLLKVQKAYHQLDQSFIDTYIDLLETRRTYYEGPGEGSPFGWKDIKEWYEMLMGHCTYFPEELRSVKYAYNADLYNALNDLNNLVITRDENEKLEYYEKFQIIENVFKQKKKPTLKQIAKEILVNEEDIKGYRVTSTGKPEFTNLKVYHDIKDITARKEIIENAELLDQIAKILTIYQSSEDIQEELTNLNSELTQEEIEQISNLKGYTGTHNLSLKAINLILDELWHTNDNQIAIFNRLKLVPKKVDLSQQKEIPTTLVDDFILSPVVKRSFIQSIKVINAIIKKYGLPNDIIIELAREKNSKDAQKMINEMQKRNRQTNERIEEIIRTTGKENAKYLIEKIKLHDMQEGKCLYSLEAIPLEDLLNNPFNYEVDHIIPRSVSFDNSFNNKVLVKQEENSKKGNRTPFQYLSSSDSKISYETFKKHILNLAKGKGRISKTKKEYLLEERDINRFSVQKDFINRNLVDTRYATRGLMNLLRSYFRVNNLDVKVKSINGGFTSFLRRKWKFKKERNKGYKHHAEDALIIANADFIFKEWKKLDKAKKVMENQMFEEKQAESMPEIETEQEYKEIFITPHQIKHIKDFKDYKYSHRVDKKPNRKLINDTLYSTRKDDKGNTLIVNNLNGLYDKDNDKLKKLINKSPEKLLMYHHDPQTYQKLKLIMEQYGDEKNPLYKYYEETGNYLTKYSKKDNGPVIKKIKYYGNKLNAHLDITDDYPNSRNKVVKLSLKPYRFDVYLDNGVYKFVTVKNLDVIKKENYYEVNSKCYEEAKKLKKISNQAEFIASFYKNDLIKINGELYRVIGVNNSTRNIVELNMIDITYREYLENMNDKRPPHIIKTIASKTQSIKKYSTDILGNLYEVKSKKHPQIIKKG

SEQ ID NO: 9015 - protein, 1053 aa, Staphylococcus aureus
MKRNYILGLDIGITSVGYGIIDYETRDVIDAGVRLFKEANVENNEGRRSKRGARRLKRRRRHRIQRVKKLLFDYNLLTDHSELSGINPYEARVKGLSQKLSEEEFSAALLHLAKRRGVHNVNEVEEDTGNELSTKEQISRNSKALEEKYVAELQLERLKKDGEVRGSINRFKTSDYVKEAKQLLKVQKAYHQLDQSFIDTYIDLLETRRTYYEGPGEGSPFGWKDIKEWYEMLMGHCTYFPEELRSVKYAYNADLYNALNDLNNLVITRDENEKLEYYEKFQIIENVFKQKKKPTLKQIAKEILVNEEDIKGYRVTSTGKPEFTNLKVYHDIKDITARKEIIENAELLDQIAKILTIYQSSEDIQEELTNLNSELTQEEIEQISNLKGYTGTHNLSLKAINLILDELWHTNDNQIAIFNRLKLVPKKVDLSQQKEIPTTLVDDFILSPVVKRSFIQSIKVINAIIKKYGLPNDIIIELAREKNSKDAQKMINEMQKRNRQTNERIEEIIRTTGKENAKYLIEKIKLHDMQEGKCLYSLEAIPLEDLLNNPFNYEVDHIIPRSVSFDNSFNNKVLVKQEENSKKGNRTPFQYLSSSDSKISYETFKKHILNLAKGKGRISKTKKEYLLEERDINRFSVQKDFINRNLVDTRYATRGLMNLLRSYFRVNNLDVKVKSINGGFTSFLRRKWKFKKERNKGYKHHAEDALIIANADFIFKEWKKLDKAKKVMENQMFEEKQAESMPEIETEQEYKEIFITPHQIKHIKDFKDYKYSHRVDKKPNRKLINDTLYSTRKDDKGNTLIVNNLNGLYDKDNDKLKKLINKSPEKLLMYHHDPQTYQKLKLIMEQYGDEKNPLYKYYEETGNYLTKYSKKDNGPVIKKIKYYGNKLNAHLDITDDYPNSRNKVVKLSLKPYRFDVYLDNGVYKFVTVKNLDVIKKENYYEVNSKCYEEAKKLKKISNQAEFIASFYKNDLIKINGELYRVIGVNSDDRNIIELNMIDITYREYLENMNDKRPPHIIKTIASKTQSIKKYSTDILGNLYEVKSKKHPQIIKKG

SEQ ID NO: 9016 - protein, 1053 aa, Staphylococcus aureus
MKRNYILGLDIGITSVGYGIIDYETRDVIDAGVRLFKEANVENNEGRRSKRGARRLKRRRRHRIQRVKKLLFDYNLLTDHSELSGINPYEARVKGLSQKLSEEEFSAALLHLAKRRGVHNVNEVEEDTGNELSTKEQISRNSKALEEKYVAELQLERLKKDGEVRGSINRFKTSDYVKEAKQLLKVQKAYHQLDQSFIDTYIDLLETRRTYYEGPGEGSPFGWKDIKEWYEMLMGHCTYFPEELRSVKYAYNADLYNALNDLNNLVITRDENEKLEYYEKFQIIENVFKQKKKPTLKQIAKEILVNEEDIKGYRVTSTGKPEFTNLKVYHDIKDITARKEIIENAELLDQIAKILTIYQSSEDIQEELTNLNSELTQEEIEQISNLKGYTGTHNLSLKAINLILDELWHTNDNQIAIFNRLKLVPKKVDLSQQKEIPTTLVDDFILSPVVKRSFIQSIKVINAIIKKYGLPNDIIIELAREKNSKDAQKMINEMQKRNRQTNERIEEIIRTTGKENAKYLIEKIKLHDMQEGKCLYSLEAIPLEDLLNNPFNYEVDHIIPRSVSFDNSFNNKVLVKQEENSKKGNRTPFQYLSSSDSKISYETFKKHILNLAKGKGRISKTKKEYLLEERDINRFSVQKDFINRNLVDTRYATRGLMNLLRSYFRVNNLDVKVKSINGGFTSFLRRKWKFKKERNKGYKHHAEDALIIANADFIFKEWKKLDKAKKVMENQMFEEKQAESMPEIETEQEYKEIFITPHQIKHIKDFKDYKYSHRVDKKPNRKLINDTLYSTRKDDKGNTLIVNNLNGLYDKDNDKLKKLINKSPEKLLMYHHDPQTYQKLKLIMEQYGDEKNPLYKYYEETGNYLTKYSKKDNGPVIKKIKYYGNKLNAHLDITDDYPNSRNKVVKLSLKPYRFDVYLDNGVYKFVTVKNLDVIKKENYYEVNSKCYEEAKKLKKISNQAEFIASFYKNDLIKINGELYRVIGVNNNRLNKIELNMIDITYREYLENMNDKRPPHIIKTIASKTQSIKKYSTDILGNLYEVKSKKHPQIIKKG

SEQ ID NO: 9017 - protein, 1084 aa, Corynebacterium diphtheriae
MKYHVGIDVGTFSVGLAAIEVDDAGMPIKTLSLVSHIHDSGLDPDEIKSAVTRLASSGIARRTRRLYRRKRRRLQQLDKFIQRQGWPVIELEDYSDPLYPWKVRAELAASYIADEKERGEKLSVALRHIARHRGWRNPYAKVSSLYLPDGPSDAFKAIREEIKRASGQPVPETATVGQMVTLCELGTLKLRGEGGVLSARLQQSDYAREIQEICRMQEIGQELYRKIIDVVFAAESPKGSASSRVGKDPLQPGKNRALKASDAFQRYRIAALIGNLRVRVDGEKRILSVEEKNLVFDHLVNLTPKKEPEWVTIAEILGIDRGQLIGTATMTDDGERAGARPPTHDTNRSIVNSRIAPLVDWWKTASALEQHAMVKALSNAEVDDFDSPEGAKVQAFFADLDDDVHAKLDSLHLPVGRAAYSEDTLVRLTRRMLSDGVDLYTARLQEFGIEPSWTPPTPRIGEPVGNPAVDRVLKTVSRWLESATKTWGAPERVIIEHVREGFVTEKRAREMDGDMRRRAARNAKLFQEMQEKLNVQGKPSRADLWRYQSVQRQNCQCAYCGSPITFSNSEMDHIVPRAGQGSTNTRENLVAVCHRCNQSKGNTPFAIWAKNTSIEGVSVKEAVERTRHWVTDTGMRSTDFKKFTKAVVERFQRATMDEEIDARSMESVAWMANELRSRVAQHFASHGTTVRVYRGSLTAEARRASGISGKLKFFDGVGKSRLDRRHHAIDAAVIAFTSDYVAETLAVRSNLKQSQAHRQEAPQWREFTGKDAEHRAAWRVWCQKMEKLSALLTEDLRDDRVVVMSNVRLRLGNGSAHKETIGKLSKVKLSSQLSVSDIDKASSEALWCALTREPGFDPKEGLPANPERHIRVNGTHVYAGDNIGLFPVSAGSIALRGGYAELGSSFHHARVYKITSGKKPAFAMLRVYTIDLLPYRNQDLFSVELKPQTMSMRQAEKKLRDALATGNAEYLGWLVVDDELVVDTSKIATDQVKAVEAELGTIRRWRVDGFFSPSKLRLRPLQMSKEGIKKESAPELSKIIDRPGWLPAVNKLFSDGNVTVVRRDSLGRVRLESTAHLPVTWKVQ

SEQ ID NO: 9018 - protein, 984 aa, Campylobacter jejuni
MARILAFDIGISSIGWAFSENDELKDCGVRIFTKVENPKTGESLALPRRLARSARKRLARRKARLNHLKHLIANEFKLNYEDYQSFDESLAKAYKGSLISPYELRFRALNELLSKQDFARVILHIAKRRGYDDIKNSDDKEKGAILKAIKQNEEKLANYQSVGEYLYKEYFQKFKENSKEFTNVRNKKESYERCIAQSFLKDELKLIFKKQREFGFSFSKKFEEEVLSVAFYKRALKDFSHLVGNCSFFTDEKRAPKNSPLAFMFVALTRIINLLNNLKNTEGILYTKDDLNALLNEVLKNGTLTYKQTKKLLGLSDDYEFKGEKGTYFIEFKKYKEFIKALGEHNLSQDDLNEIAKDITLIKDEIKLKKALAKYDLNQNQIDSLSKLEFKDHLNISFKALKLVTPLMLEGKKYDEACNELNLKVAINEDKKDFLPAFNETYYKDEVTNPVVLRAIKEYRKVLNALLKKYGKVHKINIELAREVGKNHSQRAKIEKEQNENYKAKKDAELECEKLGLKINSKNILKLRLFKEQKEFCAYSGEKIKISDLQDEKMLEIDHIYPYSRSFDDSYMNKVLVFTKQNQEKLNQTPFEAFGNDSAKWQKIEVLAKNLPTKKQKRILDKNYKDKEQKNFKDRNLNDTRYIARLVLNYTKDYLDFLPLSDDENTKLNDTQKGSKVHVEAKSGMLTSALRHTWGFSAKDRNNHLHHAIDAVIIAYANNSIVKAFSDFKKEQESNSAELYAKKISELDYKNKRKFFEPFSGFRQKVLDKIDEIFVSKPERKKPSGALHEETFRKEEEFYQSYGGKEGVLKALELGKIRKVNGKIVKNGDMFRVDIFKHKKTNKFYAVPIYTMDFALKVLPNKAVARSKKGEIKDWILMDENYEFCFSLYKDSLILIQTKDMQEPEFVYYNAFTSSTVSLIVSKHDNKFETLSKNQKILFKNANEKEVIAKSIGIQNLKVFEKYIVSALGEVTKAEFRQREDFKK

SEQ ID NO: 9019 - protein, 1087 aa, Geobacillus stearothermophilus
MRYKIGLDIGITSVGWAVMNLDIPRIEDLGVRIFDRAENPQTGESLALPRRLARSARRRLRRRKHRLERIRRLVIREGILTKEELDKLFEEKHEIDVWQLRVEALDRKLNNDELARVLLHLAKRRGFKSNRKSERSNKENSTMLKHIEENRAILSSYRTVGEMIVKDPKFALHKRNKGENYTNTIARDDLEREIRLIFSKQREFGNMSCTEEFENEYITIWASQRPVASKDDIEKKVGFCTFEPKEKRAPKATYTFQSFIAWEHINKLRLISPSGARGLTDEERRLLYEQAFQKNKITYHDIRTLLHLPDDTYFKGIVYDRGESRKQNENIRFLELDAYHQIRKAVDKVYGKGKSSSFLPIDFDTFGYALTLFKDDADIHSYLRNEYEQNGKRMPNLANKVYDNELIEELLNLSFTKFGHLSLKALRSILPYMEQGEVYSSACERAGYTFTGPKKKQKTMLLPNIPPIANPVVMRALTQARKVVNAIIKKYGSPVSIHIELARDLSQTFDERRKTKKEQDENRKKNETAIRQLMEYGLTLNPTGHDIVKFKLWSEQNGRCAYSLQPIEIERLLEPGYVEVDHVIPYSRSLDDSYTNKVLVLTRENREKGNRIPAEYLGVGTERWQQFETFVLTNKQFSKKKRDRLLRLHYDENEETEFKNRNLNDTRYISRFFANFIREHLKFAESDDKQKVYTVNGRVTAHLRSRWEFNKNREESDLHHAVDAVIVACTTPSDIAKVTAFYQRREQNKELAKKTEPHFPQPWPHFADELRARLSKHPKESIKALNLGNYDDQKLESLQPVFVSRMPKRSVTGAAHQETLRRYVGIDERSGKIQTVVKTKLSEIKLDASGHFPMYGKESDPRTYEAIRQRLLEHNNDPKKAFQEPLYKPKKNGEPGPVIRTVKIIDTKNQVIPLNDGKTVAYNSNIVRVDVFEKDGKYYCVPVYTMDIMKGILPNKAIEPNKPYSEWKEMTEDYTFRFSLYPNDLIRIELPREKTVKTAAGEEINVKDVFVYYKTIDSANGGLELISHDHRFSLRGVGSRTLKRFEKYQVDVLGNIYKVRGEKRVGLASSAHSKPGKTIRPLQSTRD

SEQ ID NO: 9020 - protein, 1378 aa, Streptococcus sp.
MDKKYSIGLDIGTNSVGWAVITDEYKVPSKKFKVLGNTDRHSIKKNLIGALLFDSGETAEATRLKRTARRRYTRRKNRICYLQEIFSNEMAKVDDSFFHRLEESFLVEEDKKHERHPIFGNIVDEVAYHEKYPTIYHLRKKLVDSTDKADLRLIYLALAHMIKFRGHFLIEGDLNPDNSDVDKLFIQLVQTYNQLFEENPINASGVDAKAILSARLSKSRKLENLIAQLPGEKKNGLFGNLIALSLGLTPNFKSNFDLAEDAKLQLSKDTYDDDLDNLLAQIGDQYADLFLAAKNLSDAILLSDILRVNTEITKAPLSASMIKRYDEHHQDLTLLKALVRQQLPEKYKEIFFDQSKNGYAGYIDGGASQEEFYKFIKPILEKMDGTEELLVKLKREDLLRKQRTFDNGSIPHQIHLGELHAILRRQEDFYPFLKDNREKIEKILTFRIPYYVGPLARGNSRFAWMTRKSEETITPWNFEEVVDKGASAQSFIERMTNFDKNLPNEKVLPKHSLLYEYFTVYNELTKVKYVTEGMRKPAFLSGEQKKAIVDLLFKTNRKVTVKQLKEDYFKKIECFDSVEISGVEDRFNASLGTYHDLLKIIKDKDFLDNEENEDILEDIVLTLTLFEDREMIEERLKTYAHLFDDKVMKQLKRRRYTGWGRLSRKLINGIRDKQSGKTILDFLKSDGFANRNFMQLIHDDSLTFKEDIQKAQVSGQGDSLHEHIANLAGSPAIKKGILQTVKVVDELVKVMGRHKPENIVIEMARENQTTQKGQKNSRERMKRIEEGIKELGSQILKEHPVENTQLQNEKLYLYYLQNGRDMYVDQELDINRLSDYDVDHIVPQSFLKDDSIDNKVLTRSDKNRGKSDNVPSEEVVKKMKNYWRQLLNAKLITQRKFDNLTKAERGGLSELDKAGFIKRQLVETRQITKHVAQILDSRMNTKYDENDKLIREVKVITLKSKLVSDFRKDFQFYKVREINNYHHAHDAYLNAVVGTALIKKYPKLESEFVYGDYKVYDVRKMIAKSEQEIGKATAKYFFYSNIMNFFKTEITLANGEIRKRPLIETNGETGEIVWDKGRDFATVRKVLSMPQVNIVKKTEIQTVGQNGGLFDDNPKSPLEVTPSKLVPLKKELNPKKYGGYQKPTTAYPVLLITDTKQLIPISVMNKKQFEQNPVKFLRDRGYQQVGKNDFIKLPKYTLVDIGDGIKRLWASSKEIHKGNQLVVSKKSQILLYHAHHLDSDLSNDYLQNHNQQFDVLFNEIISFSKKCKLGKEHIQKIENVYSNKKNSASIEELAESFIKLLGFTQLGATSPFNFLGVKLNQKQYKGKKDYILPCTEGTLIRQSITGLYETRVDLSKIGEDSGGSGGSKRTADGSEFES

SEQ ID NO: 9021 - protein, 1082 aa, Neisseria meningitidis
MAAFKPNSINYILGLDIGIASVGWAMVEIDEEENPIRLIDLGVRVFERAEVPKTGDSLAMARRLARSVRRLTRRRAHRLLRTRRLLKREGVLQAANFDENGLIKSLPNTPWQLRAAALDRKLTPLEWSAVLLHLIKHRGYLSQRKNEGETADKELGALLKGVAGNAHALQTGDFRTPAELALNKFEKESGHIRNQRSDYSHTFSRKDLQAELILLFEKQKEFGNPHVSGGLKEGIETLLMTQRPALSGDAVQKMLGHCTFEPAEPKAAKNTYTAERFIWLTKLNNLRILEQGSERPLTDTERATLMDEPYRKSKLTYAQARKLLGLEDTAFFKGLRYGKDNAEASTLMEMKAYHAISRALEKEGLKDKKSPLNLSPELQDEIGTAFSLFKTDEDITGRLKDRIQPEILEALLKHISFDKFVQISLKALRRIVPLMEQGKRYDEACAEIYGDHYGKKNTEEKIYLPPIPADEIRNPVVLRALSQARKVINGVVRRYGSPARIHIETAREVGKSFKDRKEIEKRQEENRKDREKAAAKFREYFPNFVGEPKSKDILKLRLYEQQHGKCLYSGKEINLGRLNEKGYVEIDHALPFSRTWDDSFNNKVLVLGSENQNKGNQTPYEYFNGKDNSREWQEFKARVETSRFPRSKKQRILLQKFDEDGFKERNLNDTRYVNRFLCQFVADRMRLTGKGKKRVFASNGQITNLLRGFWGLRKVRAENDRHHALDAVVVACSTVAMQQKITRFVRYKEMNAFDGKTIDKETGEVLHQKTHFPQPWEFFAQEVMIRVFGKPDGKPEFEEADTLEKLRTLLAEKLSSRPEAVHEYVTPLFVSRAPNRKMSGQGHMETVKSAKRLDEGVSVLRVPLTQLKLKDLEKMVNREREPKLYEALKARLEAHKDDPAKAFAEPFYKYDKAGNRTQQVKAVRVEQVQKTGVWVRNHNGIADNATMVRVDVFEKGDKYYLVPIYSWQVAKGILPDRAVVQGKDEEDWQLIDDSFNFKFSLHPNDLVEVITKKARMFGYFASCHRGTGNINIRIHDLDHKIGKNGILEGIGVKTALSFQKYQIDELGKEIRPCRLKKRPPVR

SEQ ID NO: 9022 - protein, 1375 aa, Streptococcus canis
MEKKYSIGLDIGTNSVGWAVITDDYKVPSKKFKVLGNTNRKSIKKNLMGALLFDSGETAEATRLKRTARRRYTRRKNRIRYLQEIFANEMAKLDDSFFQRLEESFLVEEDKKNERHPIFGNLADEVAYHRNYPTIYHLRKKLADSPEKADLRLIYLALAHIIKFRGHFLIEGKLNAENSDVAKLFYQLIQTYNQLFEESPLDEIEVDAKGILSARLSKSKRLEKLIAVFPNEKKNGLFGNIIALALGLTPNFKSNFDLTEDAKLQLSKDTYDDDLDELLGQIGDQYADLFSAAKNLSDAILLSDILRSNSEVTKAPLSASMVKRYDEHHQDLALLKTLVRQQFPEKYAEIFKDDTKNGYAGYVGIGIKHRKRTTKLATQEEFYKFIKPILEKMDGAEELLAKLNRDDLLRKQRTFDNGSIPHQIHLKELHAILRRQEEFYPFLKENREKIEKILTFRIPYYVGPLARGNSRFAWLTRKSEEAITPWNFEEVVDKGASAQSFIERMTNFDEQLPNKKVLPKHSLLYEYFTVYNELTKVKYVTERMRKPEFLSGEQKKAIVDLLFKTNRKVTVKQLKEDYFKKIECFDSVEIIGVEDRFNASLGTYHDLLKIIKDKDFLDNEENEDILEDIVLTLTLFEDREMIEERLKTYAHLFDDKVMKQLKRRHYTGWGRLSRKMINGIRDKQSGKTILDFLKSDGFSNRNFMQLIHDDSLTFKEEIEKAQVSGQGDSLHEQIADLAGSPAIKKGILQTVKIVDELVKVMGHKPENIVIEMARENQTTTKGLQQSRERKKRIEEGIKELESQILKENPVENTQLQNEKLYLYYLQNGRDMYVDQELDINRLSDYDVDHIVPQSFIKDDSIDNKVLTRSVENRGKSDNVPSEEVVKKMKNYWRQLLNAKLITQRKFDNLTKAERGGLSEADKAGFIKRQLVETRQITKHVARILDSRMNTKRDKNDKPIREVKVITLKSKLVSDFRKDFQLYKVRDINNYHHAHDAYLNAVVGTALIKKYPKLESEFVYGDYKVYDVRKMIAKSEQEIGKATAKRFFYSNIMNFFKTEVKLANGEIRKRPLIETNGETGEVVWNKEKDFATVRKVLAMPQVNIVKKTEVQTGGFSKESILSKRESAKLIPRKKGWDTRKYGGFGSPTVAYSILVVAKVEKGKAKKLKSVKVLVGITIMEKGSYEKDPIGFLEAKGYKDIKKELIFKLPKYSLFELENGRRRMLASATELQKANELVLPQHLVRLLYYTQNISATTGSNNLGYIEQHREEFKEIFEKIIDFSEKYILKNKVNSNLKSSFDEQFAVSDSILLSNSFVSLLKYTSFGASGGFTFLDLDVKQGRLRYQTVTEVLDATLIYQSITGLYETRTDLSQLGGD

SEQ ID NO: 9023 - protein, 1375 aa, Streptococcus canis
MEKKYSIGLDIGTNSVGWAVITDDYKVPSKKFKVLGNTNRKSIKKNLMGALLFDSGETAEATRLKRTARRRYTRRKNRIRYLQEIFANEMAKLDDSFFQRLEESFLVEEDKKNERHPIFGNLADEVAYHRNYPTIYHLRKKLADSPEKADLRLIYLALAHIIKFRGHFLIEGKLNAENSDVAKLFYQLIQTYNQLFEESPLDEIEVDAKGILSARLSKSKRLEKLIAVFPNEKKNGLFGNIIALALGLTPNFKSNFDLTEDAKLQLSKDTYDDDLDELLGQIGDQYADLFSAAKNLSDAILLSDILRSNSEVTKAPLSASMVKRYDEHHQDLALLKTLVRQQFPEKYAEIFKDDTKNGYAGYVGADKKLRKRSGKLATEEEFYKFIKPILEKMDGAEELLAKLNRDDLLRKQRTFDNGSIPHQIHLKELHAILRRQEEFYPFLKENREKIEKILTFRIPYYVGPLARGNSRFAWLTRKSEEAITPWNFEEVVDKGASAQSFIERMTNFDEQLPNKKVLPKHSLLYEYFTVYNELTKVKYVTERMRKPEFLSGEQKKAIVDLLFKTNRKVTVKQLKEDYFKKIECFDSVEIIGVEDRFNASLGTYHDLLKIIKDKDFLDNEENEDILEDIVLTLTLFEDREMIEERLKTYAHLFDDKVMKQLKRRHYTGWGRLSRKMINGIRDKQSGKTILDFLKSDGFSNANFMQLIHDDSLTFKEEIEKAQVSGQGDSLHEQIADLAGSPAIKKGILQTVKIVDELVKVMGHKPENIVIEMARENQTTTKGLQQSRERKKRIEEGIKELESQILKENPVENTQLQNEKLYLYYLQNGRDMYVDQELDINRLSDYDVDHIVPQSFIKDDSIDNKVLTRSVENRGKSDNVPSEEVVKKMKNYWRQLLNAKLITQRKFDNLTKAERGGLSEADKAGFIKRQLVETRQITKHVARILDSRMNTKRDKNDKPIREVKVITLKSKLVSDFRKDFQLYKVRDINNYHHAHDAYLNAVVGTALIKKYPKLESEFVYGDYKVYDVRKMIAKSEQEIGKATAKRFFYSNIMNFFKTEVKLANGEIRKRPLIETNGETGEVVWNKEKDFATVRKVLAMPQVNIVKKTEVQTGGFSKESILSKRESAKLIPRKKGWDTRKYGGFGSPTVAYSILVVAKVEKGKAKKLKSVKVLVGITIMEKGSYEKDPIGFLEAKGYKDIKKELIFKLPKYSLFELENGRRRMLASAKELQKANELVLPQHLVRLLYYTQNISATTGSNNLGYIEQHREEFKEIFEKIIDFSEKYILKNKVNSNLKSSFDEQFAVSDSILLSNSFVSLLKYTSFGASGGFTFLDLDVKQGRLRYQTVTEVLDATLIYQSITGLYETRTDLSQLGGD

SEQ ID NO: 9024 - protein, 1368 aa, Streptococcus pyogenes
MDKKYSIGLDIGTNSVGWAVITDEYKVPSKKFKVLGNTDRHSIKKNLIGALLFDSGETAEATRLKRTARRRYTRRKNRICYLQEIFSNEMAKVDDSFFHRLEESFLVEEDKKHERHPIFGNIVDEVAYHEKYPTIYHLRKKLVDSTDKADLRLIYLALAHMIKFRGHFLIEGDLNPDNSDVDKLFIQLVQTYNQLFEENPINASGVDAKAILSARLSKSRRLENLIAQLPGEKKNGLFGNLIALSLGLTPNFKSNFDLAEDAKLQLSKDTYDDDLDNLLAQIGDQYADLFLAAKNLSDAILLSDILRVNTEITKAPLSASMVKRYDEHHQDLTLLKALVRQQLPEKYKEIFFDQSKNGYAGYIDGGASQEEFYKFIKPILEKMDGTEELLVKLNREDLLRKQRTFDNGIIPHQIHLGELHAILRRQGDFYPFLKDNREKIEKILTFRIPYYVGPLARGNSRFAWMTRKSEETITPWNFEEVVDKGASAQSFIERMTNFDKNLPNEKVLPKHSLLYEYFTVYNELTKVKYVTEGMRKPAFLSGEQKKAIVDLLFKTNRKVTVKQLKEDYFKKIECFDSVEISGVEDRFNASLGTYHDLLKIIKDKDFLDNEENEDILEDIVLTLTLFEDREMIEERLKTYAHLFDDKVMKQLKRLRYTGWGRLSRKLINGIRDKQSGKTILDFLKSDGFANRNFMQLIHDDSLTFKEDIQKAQVSGQGDSLHEHIANLAGSPAIKKGILQTVKVVDELVKVMGGHKPENIVIEMARENQTTQKGQKNSRERMKRIEEGIKELGSQILKEHPVENTQLQNEKLYLYYLQNGRDMYVDQELDINRLSDYDVDHIVPQSFLKDDSIDNKVLTRSDKNRGKSDNVPSEEVVKKMKNYWRQLLNAKLITQRKFDNLTKAERGGLSELDKAGFIKRQLVETRQITKHVAQILDSRMNTKYDENDKLIREVKVITLKSKLVSDFRKDFQFYKVREINNYHHAHDAYLNAVVGTALIKKYPKLESEFVYGDYKVYDVRKMIAKSEQEIGKATAKYFFYSNIMNFFKTEITLANGEIRKRPLIETNGETGEIVWDKGRDFATVRKVLSMPQVNIVKKTEVQTGGFSKESILPKGNSDKLIARKKDWDPKKYGGFNSPTAAYSVLVVAKVEKGKSKKLKSVKELLGITIMERSSFEKNPIGFLEAKGYKEVKKDLIIKLPKYSLFELENGRKRMLASAGVLHKGNELALPSKYVNFLYLASHYEKLKGSPEDNEQKQLFVEQHKHYLDEIIEQISEFSKRVILADANLDKVLSAYNKHRDKPIREQAENIIHLFTLTNLGVPAAFKYFDTTIDKKRYTSTKEVLDATLIHQSITGLYETRIDLSQLGGD

SEQ ID NO: 9025 - protein, 1368 aa, Streptococcus pyogenes
MDKKYSIGLDIGTNSVGWAVITDEYKVPSKKFKVLGNTDRHSIKKNLIGALLFDSGETAEATRLKRTARRRYTRRKNRICYLQEIFSNEMAKVDDSFFHRLEESFLVEEDKKHERHPIFGNIVDEVAYHEKYPTIYHLRKKLVDSTDKADLRLIYLALAHMIKFRGHFLIEGDLNPDNSDVDKLFIQLVQTYNQLFEENPINASGVDAKAILSARLSKSRRLENLIAQLPGEKKNGLFGNLIALSLGLTPNFKSNFDLAEDAKLQLSKDTYDDDLDNLLAQIGDQYADLFLAAKNLSDAILLSDILRVNTEITKAPLSASMVKRYDEHHQDLTLLKALVRQQLPEKYKEIFFDQSKNGYAGYIDGGASQEEFYKFIKPILEKMDGTEELLVKLNREDLLRKQRTFDNGIIPHQIHLGELHAILRRQGDFYPFLKDNREKIEKILTFRIPYYVGPLARGNSRFAWMTRKSEETITPWNFEEVVDKGASAQSFIERMTNFDKNLPNEKVLPKHSLLYEYFTVYNELTKVKYVTEGMRKPAFLSGEQKKAIVDLLFKTNRKVTVKQLKEDYFKKIECFDSVEISGVEDRFNASLGTYHDLLKIIKDKDFLDNEENEDILEDIVLTLTLFEDREMIEERLKTYAHLFDDKVMKQLKRLRYTGWGRLSRKLINGIRDKQSGKTILDFLKSDGFANRNFMQLIHDDSLTFKEDIQKAQVSGQGDSLHEHIANLAGSPAIKKGILQTVKVVDELVKVMGGHKPENIVIEMARENQTTQKGQKNSRERMKRIEEGIKELGSQILKEHPVENTQLQNEKLYLYYLQNGRDMYVDQELDINRLSDYDVDHIVPQSFLKDDSIDNKVLTRSDKNRGKSDNVPSEEVVKKMKNYWRQLLNAKLITQRKFDNLTKAERGGLSELDKAGFIKRQLVETRQITKHVAQILDSRMNTKYDENDKLIREVKVITLKSKLVSDFRKDFQFYKVREINNYHHAHDAYLNAVVGTALIKKYPKLESEFVYGDYKVYDVRKMIAKSEQEIGKATAKYFFYSNIMNFFKTEITLANGEIRKRPLIETNGETGEIVWDKGRDFATVRKVLSMPQVNIVKKTEVQTGGFSKESILPKGNSDKLIARKKDWDPKKYGGFNSPTVAYSVLVVAKVEKGKSKKLKSVKELLGITIMERSSFEKNPIGFLEAKGYKEVKKDLIIKLPKYSLFELENGRKRMLASASVLHKGNELALPSKYVNFLYLASHYEKLKGSSEDNKQKQLFVEQHKHYLDEIIEQISEFSKRVILADANLDKVLSAYNKHRDKPIREQAENIIHLFTLTNLGASAAFKYFDTTIGRKLYTSTKEVLDATLIHQSITGLYETRIDLSQLGGD

SEQ ID NO: 9026 - protein, 1368 aa, Streptococcus pyogenes
MDKKYSIGLDIGTNSVGWAVITDEYKVPSKKFKVLGNTDRHSIKKNLIGALLFDSGETAEATRLKRTARRRYTRRKNRICYLQEIFSNEMAKVDDSFFHRLEESFLVEEDKKHERHPIFGNIVDEVAYHEKYPTIYHLRKKLVDSTDKADLRLIYLALAHMIKFRGHFLIEGDLNPDNSDVDKLFIQLVQTYNQLFEENPINASGVDAKAILSARLSKSRRLENLIAQLPGEKKNGLFGNLIALSLGLTPNFKSNFDLAEDAKLQLSKDTYDDDLDNLLAQIGDQYADLFLAAKNLSDAILLSDILRVNTEITKAPLSASMVKRYDEHHQDLTLLKALVRQQLPEKYKEIFFDQSKNGYAGYIDGGASQEEFYKFIKPILEKMDGTEELLVKLNREDLLRKQRTFDNGIIPHQIHLGELHAILRRQGDFYPFLKDNREKIEKILTFRIPYYVGPLARGNSRFAWMTRKSEETITPWNFEEVVDKGASAQSFIERMTNFDKNLPNEKVLPKHSLLYEYFTVYNELTKVKYVTEGMRKPAFLSGEQKKAIVDLLFKTNRKVTVKQLKEDYFKKIECFDSVEISGVEDRFNASLGTYHDLLKIIKDKDFLDNEENEDILEDIVLTLTLFEDREMIEERLKTYAHLFDDKVMKQLKRLRYTGWGRLSRKLINGIRDKQSGKTILDFLKSDGFANRNFMQLIHDDSLTFKEDIQKAQVSGQGDSLHEHIANLAGSPAIKKGILQTVKVVDELVKVMGGHKPENIVIEMARENQTTQKGQKNSRERMKRIEEGIKELGSQILKEHPVENTQLQNEKLYLYYLQNGRDMYVDQELDINRLSDYDVDHIVPQSFLKDDSIDNKVLTRSDKNRGKSDNVPSEEVVKKMKNYWRQLLNAKLITQRKFDNLTKAERGGLSELDKAGFIKRQLVETRQITKHVAQILDSRMNTKYDENDKLIREVKVITLKSKLVSDFRKDFQFYKVREINNYHHAHDAYLNAVVGTALIKKYPKLESEFVYGDYKVYDVRKMIAKSEQEIGKATAKYFFYSNIMNFFKTEITLANGEIRKRPLIETNGETGEIVWDKGRDFATVRKVLSMPQVNIVKKTEVQTGGFSKESILPKGNSDKLIARKKDWDPKKYGGFNSPTVAYSVLVVAKVEKGKSKKLKSVKELLGITIMERSSFEKNPIDFLEAKGYKEVKKDLIIKLPKYSLFELENGRKRMLASAGVLQKGNELALPSKYVNFLYLASHYEKLKGSPEDNEQKQLFVEQHKHYLDEIIEQISEFSKRVILADANLDKVLSAYNKHRDKPIREQAENIIHLFTLTNLGAPAAFKYFDTTINRKQYNTTKEVLDATLIRQSITGLYETRIDLSQLGGD

SEQ ID NO: 9027 - protein, 1368 aa, Streptococcus pyogenes [sequence omitted]

SEQ ID NO: 9028 - protein, 1368 aa, Streptococcus pyogenes
MDKKYSIGLDIGTNSVGWAVITDEYKVPSKKFKVLGNTDRHSIKKNLIGALLFDSGETAEATRLKRTARRRYTRRKNRICYLQEIFSNEMAKVDDSFFHRLEESFLVEEDKKHERHPIFGNIVDEVAYHEKYPTIYHLRKKLVDSTDKADLRLIYLALAHMIKFRGHFLIEGDLNPDNSDVDKLFIQLVQTYNQLFEENPINASGVDAKAILSARLSKSRRLENLIAQLPGEKKNGLFGNLIALSLGLTPNFKSNFDLAEDAKLQLSKDTYDDDLDNLLAQIGDQYADLFLAAKNLSDAILLSDILRVNTEITKAPLSASMIKRYDEHHQDLTLLKALVRQQLPEKYKEIFFDQSKNGYAGYIDGGASQEEFYKFIKPILEKMDGTEELLVKLNREDLLRKQRTFDNGSIPHQIHLGELHAILRRQEDFYPFLKDNREKIEKILTFRIPYYVGPLARGNSRFAWMTRKSEETITPWNFEEVVDKGASAQSFIERMTNFDKNLPNEKVLPKHSLLYEYFTVYNELTKVKYVTEGMRKPAFLSGEQKKAIVDLLFKTNRKVTVKQLKEDYFKKIECFDSVEISGVEDRFNASLGTYHDLLKIIKDKDFLDNEENEDILEDIVLTLTLFEDREMIEERLKTYAHLFDDKVMKQLKRRRYTGWGRLSRKLINGIRDKQSGKTILDFLKSDGFANRNFMQLIHDDSLTFKEDIQKAQVSGQGDSLHEHIANLAGSPAIKKGILQTVKVVDELVKVMGRHKPENIVIEMARENQTTQKGQKNSRERMKRIEEGIKELGSQILKEHPVENTQLQNEKLYLYYLQNGRDMYVDQELDINRLSDYDVDHIVPQSFLKDDSIDNKVLTRSDKNRGKSDNVPSEEVVKKMKNYWRQLLNAKLITQRKFDNLTKAERGGLSELDKAGFIKRQLVETRQITKHVAQILDSRMNTKYDENDKLIREVKVITLKSKLVSDFRKDFQFYKVREINNYHHAHDAYLNAVVGTALIKKYPKLESEFVYGDYKVYDVRKMIAKSEQEIGKATAKYFFYSNIMNFFKTEITLANGEIRKRPLIETNGETGEIVWDKGRDFATVRKVLSMPQVNIVKKTEVQTGGFSKESILPKRNSDKLIARKKDWDPKKYGGFDSPTVAYSVLVVAKVEKGKSKKLKSVKELLGITIMERSSFEKNPIDFLEAKGYKEVKKDLIIKLPKYSLFELENGRKRMLASARELQKGNELALPSKYVNFLYLASHYEKLKGSPEDNEQKQLFVEQHKHYLDEIIEQISEFSKRVILADAQLDKVLSAYNKHRDKPIREQAENIIHLFTLTNLGAPAAFKYFDTTFKQKQYRSTKEVLDATLIHQSITGLYETRIDLSQLGGD

SEQ ID NO: 9029 - protein, 1368 aa, Streptococcus pyogenes
MDKKYSIGLDIGTNSVGWAVITDEYKVPSKKFKVLGNTDRHSIKKNLIGALLFDSGETAEATRLKRTARRRYTRRKNRICYLQEIFSNEMAKVDDSFFHRLEESFLVEEDKKHERHPIFGNIVDEVAYHEKYPTIYHLRKKLVDSTDKADLRLIYLALAHMIKFRGHFLIEGDLNPDNSDVDKLFIQLVQTYNQLFEENPINASGVDAKAILSARLSKSRRLENLIAQLPGEKKNGLFGNLIALSLGLTPNFKSNFDLAEDAKLQLSKDTYDDDLDNLLAQIGDQYADLFLAAKNLSDAILLSDILRVNTEITKAPLSASMIKRYDEHHQDLTLLKALVRQQLPEKYKEIFFDQSKNGYAGYIDGGASQEEFYKFIKPILEKMDGTEELLVKLNREDLLRKQRTFDNGSIPHQIHLGELHAILRRQEDFYPFLKDNREKIEKILTFRIPYYVGPLARGNSRFAWMTRKSEETITPWNFEEVVDKGASAQSFIERMTNFDKNLPNEKVLPKHSLLYEYFTVYNELTKVKYVTEGMRKPAFLSGEQKKAIVDLLFKTNRKVTVKQLKEDYFKKIECFDSVEISGVEDRFNASLGTYHDLLKIIKDKDFLDNEENEDILEDIVLTLTLFEDREMIEERLKTYAHLFDDKVMKQLKRRRYTGWGRLSRKLINGIRDKQSGKTILDFLKSDGFANRNFMQLIHDDSLTFKEDIQKAQVSGQGDSLHEHIANLAGSPAIKKGILQTVKVVDELVKVMGRHKPENIVIEMARENQTTQKGQKNSRERMKRIEEGIKELGSQILKEHPVENTQLQNEKLYLYYLQNGRDMYVDQELDINRLSDYDVDHIVPQSFLKDDSIDNKVLTRSDKNRGKSDNVPSEEVVKKMKNYWRQLLNAKLITQRKFDNLTKAERGGLSELDKAGFIKRQLVETRQITKHVAQILDSRMNTKYDENDKLIREVKVITLKSKLVSDFRKDFQFYKVREINNYHHAHDAYLNAVVGTALIKKYPKLESEFVYGDYKVYDVRKMIAKSEQEIGKATAKYFFYSNIMNFFKTEITLANGEIRKRPLIETNGETGEIVWDKGRDFATVRKVLSMPQVNIVKKTEVQTGGFSKESILPKRNSDKLIARKKDWDPKKYGGFLWPTVAYSVLVVAKVEKGKSKKLKSVKELLGITIMERSSFEKNPIDFLEAKGYKEVKKDLIIKLPKYSLFELENGRKRMLASAKQLQKGNELALPSKYVNFLYLASHYEKLKGSPEDNEQKQLFVEQHKHYLDEIIEQISEFSKRVILADANLDKVLSAYNKHRDKPIREQAENIIHLFTLTNLGAPAAFKYFDTTIDRKQYRSTKEVLDATLIHQSITGLYETRIDLSQLGGD

SEQ ID NO: 9030 - protein, 1368 aa, Streptococcus pyogenes
MDKKYSIGLDIGTNSVGWAVITDEYKVPSKKFKVLGNTDRHSIKKNLIGALLFDSGETAEATRLKRTARRRYTRRKNRICYLQEIFSNEMAKVDDSFFHRLEESFLVEEDKKHERHPIFGNIVDEVAYHEKYPTIYHLRKKLVDSTDKADLRLIYLALAHMIKFRGHFLIEGDLNPDNSDVDKLFIQLVQTYNQLFEENPINASGVDAKAILSARLSKSRRLENLIAQLPGEKKNGLFGNLIALSLGLTPNFKSNFDLAEDAKLQLSKDTYDDDLDNLLAQIGDQYADLFLAAKNLSDAILLSDILRVNTEITKAPLSASMIKRYDEHHQDLTLLKALVRQQLPEKYKEIFFDQSKNGYAGYIDGGASQEEFYKFIKPILEKMDGTEELLVKLNREDLLRKQRTFDNGSIPHQIHLGELHAILRRQEDFYPFLKDNREKIEKILTFRIPYYVGPLARGNSRFAWMTRKSEETITPWNFEEVVDKGASAQSFIERMTNFDKNLPNEKVLPKHSLLYEYFTVYNELTKVKYVTEGMRKPAFLSGEQKKAIVDLLFKTNRKVTVKQLKEDYFKKIECFDSVEISGVEDRFNASLGTYHDLLKIIKDKDFLDNEENEDILEDIVLTLTLFEDREMIEERLKTYAHLFDDKVMKQLKRRRYTGWGRLSRKLINGIRDKQSGKTILDFLKSDGFANRNFMQLIHDDSLTFKEDIQKAQVSGQGDSLHEHIANLAGSPAIKKGILQTVKVVDELVKVMGRHKPENIVIEMARENQTTQKGQKNSRERMKRIEEGIKELGSQILKEHPVENTQLQNEKLYLYYLQNGRDMYVDQELDINRLSDYDVDHIVPQSFLKDDSIDNKVLTRSDKNRGKSDNVPSEEVVKKMKNYWRQLLNAKLITQRKFDNLTKAERGGLSELDKAGFIKRQLVETRQITKHVAQILDSRMNTKYDENDKLIREVKVITLKSKLVSDFRKDFQFYKVREINNYHHAHDAYLNAVVGTALIKKYPKLESEFVYGDYKVYDVRKMIAKSEQEIGKATAKYFFYSNIMNFFKTEITLANGEIRKRPLIETNGETGEIVWDKGRDFATVRKVLSMPQVNIVKKTEVQTGGFSKESILPKRNSDKLIARKKDWDPKKYGGFVSPTVAYSVLVVAKVEKGKSKKLKSVKELLGITIMERSSFEKNPIDFLEAKGYKEVKKDLIIKLPKYSLFELENGRKRMLASAGELQKGNELALPSKYVNFLYLASHYEKLKGSPEDNEQKQLFVEQHKHYLDEIIEQISEFSKRVILADANLDKVLSAYNKHRDKPIREQAENIIHLFTLTNLGAPAAFKYFDTTIDRKQYRSTKEVLDATLIHQSITGLYETRIDLSQLGGD

SEQ ID NO: 9031 - protein, 1368 aa, Streptococcus pyogenes
MDKKYSIGLDIGTNSVGWAVITDEYKVPSKKFKVLGNTDRHSIKKNLIGALLFDSGETAEATRLKRTARRRYTRRKNRICYLQEIFSNEMAKVDDSFFHRLEESFLVEEDKKHERHPIFGNIVDEVAYHEKYPTIYHLRKKLVDSTDKADLRLIYLALAHMIKFRGHFLIEGDLNPDNSDVDKLFIQLVQTYNQLFEENPINASGVDAKAILSARLSKSRRLENLIAQLPGEKKNGLFGNLIALSLGLTPNFKSNFDLAEDAKLQLSKDTYDDDLDNLLAQIGDQYADLFLAAKNLSDAILLSDILRVNTEITKAPLSASMIKRYDEHHQDLTLLKALVRQQLPEKYKEIFFDQSKNGYAGYIDGGASQEEFYKFIKPILEKMDGTEELLVKLNREDLLRKQRTFDNGSIPHQIHLGELHAILRRQEDFYPFLKDNREKIEKILTFRIPYYVGPLARGNSRFAWMTRKSEETITPWNFEEVVDKGASAQSFIERMTNFDKNLPNEKVLPKHSLLYEYFTVYNELTKVKYVTEGMRKPAFLSGEQKKAIVDLLFKTNRKVTVKQLKEDYFKKIECFDSVEISGVEDRFNASLGTYHDLLKIIKDKDFLDNEENEDILEDIVLTLTLFEDREMIEERLKTYAHLFDDKVMKQLKRRRYTGWGRLSRKLINGIRDKQSGKTILDFLKSDGFANRNFMQLIHDDSLTFKEDIQKAQVSGQGDSLHEHIANLAGSPAIKKGILQTVKVVDELVKVMGRHKPENIVIEMARENQTTQKGQKNSRERMKRIEEGIKELGSQILKEHPVENTQLQNEKLYLYYLQNGRDMYVDQELDINRLSDYDVDHIVPQSFLKDDSIDNKVLTRSDKNRGKSDNVPSEEVVKKMKNYWRQLLNAKLITQRKFDNLTKAERGGLSELDKAGFIKRQLVETRQITKHVAQILDSRMNTKYDENDKLIREVKVITLKSKLVSDFRKDFQFYKVREINNYHHAHDAYLNAVVGTALIKKYPKLESEFVYGDYKVYDVRKMIAKSEQEIGKATAKYFFYSNIMNFFKTEITLANGEIRKRPLIETNGETGEIVWDKGRDFATVRKVLSMPQVNIVKKTEVQTGGFSKESILPKRNSDKLIARKKDWDPKKYGGFVSPTVAYSVLVVAKVEKGKSKKLKSVKELLGITIMERSSFEKNPIDFLEAKGYKEVKKDLIIKLPKYSLFELENGRKRMLASARELQKGNELALPSKYVNFLYLASHYEKLKGSPEDNEQKQLFVEQHKHYLDEIIEQISEFSKRVILADANLDKVLSAYNKHRDKPIREQAENIIHLFTLTNLGAPAAFKYFDTTIDRKEYRSTKEVLDATLIHQSITGLYETRIDLSQLGGD

SEQ ID NO: 9032 - protein, 1368 aa, Streptococcus pyogenes
MDKKYSIGLDIGTNSVGWAVITDEYKVPSKKFKVLGNTDRHSIKKNLIGALLFDSGETAEATRLKRTARRRYTRRKNRICYLQEIFSNEMAKVDDSFFHRLEESFLVEEDKKHERHPIFGNIVDEVAYHEKYPTIYHLRKKLVDSTDKADLRLIYLALAHMIKFRGHFLIEGDLNPDNSDVDKLFIQLVQTYNQLFEENPINASGVDAKAILSARLSKSRRLENLIAQLPGEKKNGLFGNLIALSLGLTPNFKSNFDLAEDTKLQLSKDTYDDDLDNLLAQIGDQYADLFLAAKNLSDAILLSDILRVNTEITKAPLSASMIKLYDEHHQDLTLLKALVRQQLPEKYKEIFFDQSKNGYAGYIDGGASQEEFYKFIKPILEKMDGTEELLVKLNREDLLRKQRTFDNGIIPHQIHLGELHAILRRQEDFYPFLKDNREKIEKILTFRIPYYVGPLARGNSRFAWMTRKSEETITPWNFEKVVDKGASAQSFIERMTNFDKNLPNEKVLPKHSLLYEYFTVYNELTKVKYVTEGMRKPAFLSGDQKKAIVDLLFKTNRKVTVKQLKEDYFKKIECFDSVEISGVEDRFNASLGTYHDLLKIIKDKDFLDNEENEDILEDIVLTLTLFEDREMIEERLKTYAHLFDDKVMKQLKRRRYTGWGRLSRKLINGIRDKQSGKTILDFLKSDGFANRNFIQLIHDDSLTFKEDIQKAQVSGQGDSLHEHIANLAGSPAIKKGILQTVKVVDELVKVMGRHKPENIVIEMARENQTTQKGQKNSRERMKRIEEGIKELGSQILKEHPVENTQLQNEKLYLYYLQNGRDMYVDQELDINRLSDYDVDHIVPQSFLKDDSIDNKVLTRSDKNRGKSDNVPSEEVVKKMKNYWRQLLNAKLITQRKFDNLTKAERGGLSELDKAGFIKRQLVETRQITKHVAQILDSRMNTKYDENDKLIREVKVITLKSKLVSDFRKDFQFYKVREINNYHHAHDAYLNAVVGTALIKKYPKLESEFVYGDYKVYDVRKMIAKSEQEIGKATAKYFFYSNIMNFFKTEITLANGEIRKRPLIETNGETGEIVWDKGRDFATVRKVLSMPQVNIVKKTEVQTGGFSKESILPKRNSDKLIARKKDWDPKKYGGFDSPTVAYSVLVVAKVEKGKSKKLKSVKELLGITIMERSSFEKNPIDFLEAKGYKEVKKDLIIKLPKYSLFELENGRKRMLASAGVLQKGNELALPSKYVNFLYLASHYEKLKGSPEDNEQKQLFVEQHKHYLDEIIEQISEFSKRVILADANLDKVLSAYNKHRDKPIREQAENIIHLFTLTNLGAPAAFKYFDTTIDRKRYTSTKEVLDATLIHQSITGLYETRIDLSQLGGD

SEQ ID NO: 9033 - protein, 1368 aa, Streptococcus pyogenes
MDKKYSIGLDIGTNSVGWAVITDEYKVPSKKFKVLGNTDRHSIKKNLIGALLFDSGETAEATRLKRTARRRYTRRKNRICYLQEIFSNEMAKVDDSFFHRLEESFLVEEDKKHERHPIFGNIVDEVAYHEKYPTIYHLRKKLVDSTDKADLRLIYLALAHMIKFRGHFLIEGDLNPDNSDVDKLFIQLVQTYNQLFEENPINASGVDAKAILSARLSKSRRLENLIAQLPGEKKNGLFGNLIALSLGLTPNFKSNFDLAEDTKLQLSKDTYDDDLDNLLAQIGDQYADLFLAAKNLSDAILLSDILRVNTEITKAPLSASMIKLYDEHHQDLTLLKALVRQQLPEKYKEIFFDQSKNGYAGYIDGGASQEEFYKFIKPILEKMDGTEELLVKLNREDLLRKQRTFDNGIIPHQIHLGELHAILRRQEDFYPFLKDNREKIEKILTFRIPYYVGPLARGNSRFAWMTRKSEETITPWNFEKVVDKGASAQSFIERMTNFDKNLPNEKVLPKHSLLYEYFTVYNELTKVKYVTEGMRKPAFLSGDQKKAIVDLLFKTNRKVTVKQLKEDYFKKIECFDSVEISGVEDRFNASLGTYHDLLKIIKDKDFLDNEENEDILEDIVLTLTLFEDREMIEERLKTYAHLFDDKVMKQLKRRRYTGWGRLSRKLINGIRDKQSGKTILDFLKSDGFANRNFIQLIHDDSLTFKEDIQKAQVSGQGDSLHEHIANLAGSPAIKKGILQTVKVVDELVKVMGRHKPENIVIEMARENQTTQKGQKNSRERMKRIEEGIKELGSQILKEHPVENTQLQNEKLYLYYLQNGRDMYVDQELDINRLSDYDVDHIVPQSFLKDDSIDNKVLTRSDKNRGKSDNVPSEEVVKKMKNYWRQLLNAKLITQRKFDNLTKAERGGLSELDKAGFIKRQLVETRQITKHVAQILDSRMNTKYDENDKLIREVKVITLKSKLVSDFRKDFQFYKVREINNYHHAHDAYLNAVVGTALIKKYPKLESEFVYGDYKVYDVRKMIAKSEQEIGKATAKYFFYSNIMNFFKTEITLANGEIRKRPLIETNGETGEIVWDKGRDFATVRKVLSMPQVNIVKKTEVQTGGFSKESIRPKRNSDKLIARKKDWDPKKYGGFVSPTVAYSVLVVAKVEKGKSKKLKSVKELLGITIMERSSFEKNPIDFLEAKGYKEVKKDLIIKLPKYSLFELENGRKRMLASARFLQKGNELALPSKYVNFLYLASHYEKLKGSPEDNEQKQLFVEQHKHYLDEIIEQISEFSKRVILADANLDKVLSAYNKHRDKPIREQAENIIHLFTLTNLGAPRAFKYFDTTIDRKVYRSTKEVLDATLIHQSITGLYETRIDLSQLGGD

SEQ ID NO: 9034 - protein, 1122 aa, Streptococcus thermophilus
MSDLVLGLDIGIGSVGVGILNKVTGEIIHKNSRIFPAAQAENNLVRRTNRQGRRLARRKKHRRVRLNRLFEESGLITDFTKISINLNPYQLRVKGLTDELSNEELFIALKNMVKHRGISYLDDASDDGNSSVGDYAQIVKENSKQLETKTPGQIQLERYQTYGQLRGDFTVEKDGKKHRLINVFPTSAYRSEALRILQTQQEFNPQITDEFINRYLEILTGKRKYYHGPGNEKSRTDYGRYRTSGETLDNIFGILIGKCTFYPDEFRAAKASYTAQEFNLLNDLNNLTVPTETKKLSKEQKNQIINYVKNEKAMGPAKLFKYIAKLLSCDVADIKGYRIDKSGKAEIHTFEAYRKMKTLETLDIEQMDRETLDKLAYVLTLNTEREGIQEALEHEFADGSFSQKQVDELVQFRKANSSIFGKGWHNFSVKLMMELIPELYETSEEQMTILTRLGKQKTTSSSNKTKYIDEKLLTEEIYNPVVAKSVRQAIKIVNAAIKEYGDFDNIVIEMARETNEDDEKKAIQKIQKANKDEKDAAMLKAANQYNGKAELPHSVFHGHKQLATKIRLWHQQGERCLYTGKTISIHDLINNSNQFEVDHILPLSITFDDSLANKVLVYATANQEKGQRTPYQALDSMDDAWSFRELKAFVRESKTLSNKKKEYLLTEEDISKFDVRKKFIERNLVDTRYASRVVLNALQEHFRAHKIDTKVSVVRGQFTSQLRRHWGIEKTRDTYHHHAVDALIIAASSQLNLWKKQKNTLVSYSEEQLLDIETGELISDDEYKESVFKAPYQHFVDTLKSKEFEDSILFSYQVDSKFNRKISDATIYATRQAKVGKDKKDETYVLGKIKDIYTQDGYDAFMKIYKKDKSKFLMYRHDPQTFEKVIEPILENYPNKQMNEKGKEVPCNPFLKYKEEHGYIRKYSKKGNGPEIKSLKYYDSKLLGNPIDITPENSKNKVVLQSLKPWRTDVYFNKATGKYEILGLKYADLQFEKGTGTYKISQEKYNDIKKKEGVDSDSEFKFTLYKNDLLLVKDTETKEQQLFRFLSRTLPKQKHYVELKPYDKQKFEGGEALIKVLGNVANGGQCIKGLAKSNISIYKVRTDVLGNQHIIKNEGDKPKLDF

SEQ ID NO: 9035 - protein, 1122 aa, Streptococcus thermophilus
MSDLVLGLDIGIGSVGVGILNKVTGEIIHKNSRIFPAAQAENNLVRRTNRQGRRLARRKKHRRVRLNRLFEESGLITDFTKISINLNPYQLRVKGLTDELSNEELFIALKNMVKHRGISYLDDASDDGNSSVGDYAQIVKENSKQLETKTPGQIQLERYQTYGQLRGDFTVEKDGKKHRLINVFPTSAYRSEALRILQTQQEFNPQITDEFINRYLEILTGKRKYYHGPGNEKSRTDYGRYRTSGETLDNIFGILIGKCTFYPDEFRAAKASYTAQEFNLLNDLNNLTVPTETKKLSKEQKNQIINYVKNEKAMGPAKLFKYIAKLLSCDVADIKGYRIDKSGKAEIHTFEAYRKMKTLETLDIEQMDRETLDKLAYVLTLNTEREGIQEALEHEFADGSFSQKQVDELVQFRKANSSIFGKGWHNFSVKLMMELIPELYETSEEQMTILTRLGKQKTTSSSNKTKYIDEKLLTEEIYNPVVAKSVRQAIKIVNAAIKEYGDFDNIVIEMARETNEDDEKKAIQKIQKANKDEKDAAMLKAANQYNGKAELPHSVFHGHKQLATKIRLWHQQGERCLYTGKTISIHDLINNSNQFEVDHILPLSITFDDSLANKVLVYATANQEKGQRTPYQALDSMDDAWSFRELKAFVRESKTLSNKKKEYLLTEEDISKFDVRKKFIERNLVDTRYASRVVLNALQEHFRAHKIDTKVSVVRGQFTSQLRRHWGIEKTRDTYHHHAVDALIIAASSQLNLWKKQKNTLVSYSEEQLLDIETGELISDDEYKESVFKAPYQHFVDTLKSKEFEDSILFSYQVDSKFNRKISDATIYATRQAKVGKDKKDETYVLGKIKDIYTQDGYDAFMKIYKKDKSKFLMYRHDPQTFEKVIEPILENYPNKQMNEKGKEVPCNPFLKYKEEHGYIRKYSKKGNGPEIKSLKYYDSKLLGNPIDITPENSKNKVVLQSLKPWRTDVYFNKNTGKYEILGLKYADLQFEKKTGTYKISQEKYNGIMKEEGVDSDSEFKFTLYKNDLLLVKDTETKEQQLFRFLSRTMPNVKYYVELKPYSKDKFEKNESLIEILGSADKSGRCIKGLGKSNISIYKVRTDVLGNQHIIKNEGDKPKLDF

SEQ ID NO: 9036 - protein, 1120 aa, Streptococcus thermophilus
MSDLVLGLDIGIGSVGVGILNKVTGEIIHKNSRIFPAAQAENNLVRRTNRQGRRLARRKKHRRVRLNRLFEESGLITDFTKISINLNPYQLRVKGLTDELSNEELFIALKNMVKHRGISYLDDASDDGNSSVGDYAQIVKENSKQLETKTPGQIQLERYQTYGQLRGDFTVEKDGKKHRLINVFPTSAYRSEALRILQTQQEFNPQITDEFINRYLEILTGKRKYYHGPGNEKSRTDYGRYRTSGETLDNIFGILIGKCTFYPDEFRAAKASYTAQEFNLLNDLNNLTVPTETKKLSKEQKNQIINYVKNEKAMGPAKLFKYIAKLLSCDVADIKGYRIDKSGKAEIHTFEAYRKMKTLETLDIEQMDRETLDKLAYVLTLNTEREGIQEALEHEFADGSFSQKQVDELVQFRKANSSIFGKGWHNFSVKLMMELIPELYETSEEQMTILTRLGKQKTTSSSNKTKYIDEKLLTEEIYNPVVAKSVRQAIKIVNAAIKEYGDFDNIVIEMARETNEDDEKKAIQKIQKANKDEKDAAMLKAANQYNGKAELPHSVFHGHKQLATKIRLWHQQGERCLYTGKTISIHDLINNSNQFEVDHILPLSITFDDSLANKVLVYATANQEKGQRTPYQALDSMDDAWSFRELKAFVRESKTLSNKKKEYLLTEEDISKFDVRKKFIERNLVDTRYASRVVLNALQEHFRAHKIDTKVSVVRGQFTSQLRRHWGIEKTRDTYHHHAVDALIIAASSQLNLWKKQKNTLVSYSEDQLLDIETGELISDDEYKESVFKAPYQHFVDTLKSKEFEDSILFSYQVDSKFNRKISDATIYATRQAKVGKDKADETYVLGKIKDIYTQDGYDAFMKIYKKDKSKFLMYRHDPQTFEKVIEPILENYPNKQINEKGKEVPCNPFLKYKEEHGYIRKYSKKGNGPEIKSLKYYDSKLGNHIDITPKDSNNKVVLQSLKPWRTDVYFNKNTGKYEILGLKYSDMQFEKGTGKYSISKEQYENIKVREGVDENSEFKFTLYKNDLLLLKDSENGEQILLRFTSRNDTSKHYVELKPYNRQKFEGSEYLIKSLGTVAKGGQCIKGLGKSNISIYKVRTDVLGNQHIIKNEGDKPKLDF

SEQ ID NO: 9037 - protein, 1120 aa, Streptococcus thermophilus
MSDLVLGLDIGIGSVGVGILNKVTGEIIHKNSRIFPAAQAENNLVRRTNRQGRRLARRKKHRRVRLNRLFEESGLITDFTKISINLNPYQLRVKGLTDELSNEELFIALKNMVKHRGISYLDDASDDGNSSVGDYAQIVKENSKQLETKTPGQIQLERYQTYGQLRGDFTVEKDGKKHRLINVFPTSAYRSEALRILQTQQEFNPQITDEFINRYLEILTGKRKYYHGPGNEKSRTDYGRYRTSGETLDNIFGILIGKCTFYPDEFRAAKASYTAQEFNLLNDLNNLTVPTETKKLSKEQKNQIINYVKNEKAMGPAKLFKYIAKLLSCDVADIKGYRIDKSGKAEIHTFEAYRKMKTLETLDIEQMDRETLDKLAYVLTLNTEREGIQEALEHEFADGSFSQKQVDELVQFRKANSSIFGKGWHNFSVKLMMELIPELYETSEEQMTILTRLGKQKTTSSSNKTKYIDEKLLTEEIYNPVVAKSVRQAIKIVNAAIKEYGDFDNIVIEMARETNEDDEKKAIQKIQKANKDEKDAAMLKAANQYNGKAELPHSVFHGHKQLATKIRLWHQQGERCLYTGKTISIHDLINNSNQFEVDHILPLSITFDDSLANKVLVYATANQEKGQRTPYQALDSMDDAWSFRELKAFVRESKTLSNKKKEYLLTEEDISKFDVRKKFIERNLVDTRYASRVVLNALQEHFRAHKIDTKVSVVRGQFTSQLRRHWGIEKTRDTYHHHAVDALIIAASSQLNLWKKQKNTLVSYSEDQLLDIETGELISDDEYKESVFKAPYQHFVDTLKSKEFEDSILFSYQVDSKFNRKISDATIYATRQAKVGKDKADETYVLGKIKDIYTQDGYDAFMKIYKKDKSKFLMYRHDPQTFEKVIEPILENYPNKQINEKGKEVPCNPFLKYKEEHGYIRKYSKKGNGPEIKSLKYYDSKLGNHIDITPKDSNNKVVLQSLKPWRTDVYFNKNTGKYEILGLKYSDMQFEKGTGKYSISKEQYENIKVREGVDENSEFKFTLYKNDLLLLKDSENGEQILLRFTSRNDTSKHYVELKPYNRQKFEGSEYLIKSLGTVVKGGRCIKGLGKSNISIYKVRTDVLGNQHIIKNEGDKPKLDF

SEQ ID NO: 9038 - protein, 1057 aa, Staphylococcus sp.
MNQKFILGLDIGITSVGYGLIDYETKNIIDAGVRLFPEANVENNEGRRSKRGSRRLKRRRIHRLERVKLLLTEYDLINKEQIPTSNNPYQIRVKGLSEILSKDELAIALLHLAKRRGIHNVDVAADKEETASDSLSTKDQINKNAKFLESRYVCELQKERLENEGHVRGVENRFLTKDIVREAKKIIDTQMQYYPEIDETFKEKYISLVETRREYFEGPGQGSPFGWNGDLKKWYEMLMGHCTYFPQELRSVKYAYSADLFNALNDLNNLIIQRDNSEKLEYHEKYHIIENVFKQKKKPTLKQIAKEIGVNPEDIKGYRITKSGTPEFTSFKLFHDLKKVVKDHAILDDIDLLNQIAEILTIYQDKDSIVAELGQLEYLMSEADKQSISELTGYTGTHSLSLKCMNMIIDELWHSSMNQMEVFTYLNMRPKKYELKGYQRIPTDMIDDAILSPVVKRTFIQSINVINKVIEKYGIPEDIIIELARENNSDDRKKFINNLQKKNEATRKRINEIIGQTGNQNAKRIVEKIRLHDQQEGKCLYSLESIPLEDLLNNPNHYEVDHIIPRSVSFDNSYHNKVLVKQSENSKKSNLTPYQYFNSGKSKLSYNQFKQHILNLSKSQDRISKKKKEYLLEERDINKFEVQKEFINRNLVDTRYATRELTNYLKAYFSANNMNVKVKTINGSFTDYLRKVWKFKKERNHGYKHHAEDALIIANADFLFKENKKLKAVNSVLEKPEIETKQLDIQVDSEDNYSEMFIIPKQVQDIKDFRNFKYSHRVDKKPNRQLINDTLYSTRKKDNSTYIVQTIKDIYAKDNTTLKKQFDKSPEKFLMYQHDPRTFEKLEVIMKQYANEKNPLAKYHEETGEYLTKYSKKNNGPIVKSLKYIGNKLGSHLDVTHQFKSSTKKLVKLSIKNYRFDVYLTEKGYKFVTIAYLNVFKKDNYYYIPKDKYQELKEKKKIKDTDQFIASFYKNDLIKLNGDLYKIIGVNSDDRNIIELDYYDIKYKDYCEINNIKGEPRIKKTIGKKTESIEKFTTDVLGNLYLHSTEKAPQLIFKRGL

SEQ ID NO: 9039 - protein, 1057 aa, Staphylococcus sp.
MNQKFILGLDIGITSVGYGLIDYETKNIIDAGVRLFPEANVENNEGRRSKRGSRRLKRRRIHRLERVKLLLTEYDLINKEQIPTSNNPYQIRVKGLSEILSKDELAIALLHLAKRRGIHNVDVAADKEETASDSLSTKDQINKNAKFLESRYVCELQKERLENEGHVRGVENRFLTKDIVREAKKIIDTQMQYYPEIDETFKEKYISLVETRREYFEGPGQGSPFGWNGDLKKWYEMLMGHCTYFPQELRSVKYAYSADLFNALNDLNNLIIQRDNSEKLEYHEKYHIIENVFKQKKKPTLKQIAKEIGVNPEDIKGYRITKSGTPEFTSFKLFHDLKKVVKDHAILDDIDLLNQIAEILTIYQDKDSIVAELGQLEYLMSEADKQSISELTGYTGTHSLSLKCMNMIIDELWHSSMNQMEVFTYLNMRPKKYELKGYQRIPTDMIDDAILSPVVKRTFIQSINVINKVIEKYGIPEDIIIELARENNSDDRKKFINNLQKKNEATRKRINEIIGQTGNQNAKRIVEKIRLHDQQEGKCLYSLESIPLEDLLNNPNHYEVDHIIPRSVSFDNSYHNKVLVKQSENSKKSNLTPYQYFNSGKSKLSYNQFKQHILNLSKSQDRISKKKKEYLLEERDINKFEVQKEFINRNLVDTRYATRELTSYLKAYFSANNMDVKVKTINGSFTNHLRKVWRFDKYRNHGYKHHAEDALIIANADFLFKENKKLQNTNKILEKPTIENNTKKVTVEKEEDYNNVFETPKLVEDIKQYRDYKFSHRVDKKPNRQLINDTLYSTRMKDEHDYIVQTITDIYGKDNTNLKKQFNKNPEKFLMYQNDPKTFEKLSIIMKQYSDEKNPLAKYYEETGEYLTKYSKKNNGPIVKKIKLLGNKVGNHLDVTNKYENSTKKLVKLSIKNYRFDVYLTEKGYKFVTIAYLNVFKKDNYYYIPKDKYQELKEKKKIKDTDQFIASFYKNDLIKLNGDLYKIIGVNSDDRNIIELDYYDIKYKDYCEINNIKGEPRIKKTIGKKTESIEKFTTDVLGNLYLHSTEKAPQLIFKRGL

SEQ ID NO: 9040-10050 - skipped (1011 entries)

SEQ ID NO: 10051 - DNA, 24 bp, synthetic construct
  source 1..24: mol_type = other DNA
gttgtagctccctttctcatttcg

SEQ ID NO: 10052 - DNA, 25 bp, synthetic construct
  source 1..25: mol_type = other DNA
gttgtagctccctttttcatttcgc

SEQ ID NO: 10053 - DNA, 14 bp, synthetic construct
  source 1..14: mol_type = other DNA
gttttagtactctg

SEQ ID NO: 10054 - DNA, 14 bp, synthetic construct
  source 1..14: mol_type = other DNA
gttttagtactctg

SEQ ID NO: 10055 - DNA, 14 bp, synthetic construct
  source 1..14: mol_type = other DNA
gttttagtactctg

SEQ ID NO: 10056 - DNA, 14 bp, synthetic construct
  source 1..14: mol_type = other DNA
gttttagtactctg

SEQ ID NO: 10057 - DNA, 12 bp, synthetic construct
  source 1..12: mol_type = other DNA
gttttagagcta

SEQ ID NO: 10058 - DNA, 12 bp, synthetic construct
  source 1..12: mol_type = other DNA
gttttagagcta

SEQ ID NO: 10059 - DNA, 12 bp, synthetic construct
  source 1..12: mol_type = other DNA
gttttagagcta

SEQ ID NO: 10060 - DNA, 12 bp, synthetic construct
  source 1..12: mol_type = other DNA
gttttagagcta

SEQ ID NO: 10061 - DNA, 14 bp, synthetic construct
  source 1..14: mol_type = other DNA
gtctttgtactctg

SEQ ID NO: 10062 - DNA, 16 bp, synthetic construct
  source 1..16: mol_type = other DNA
gctatagttccttact

SEQ ID NO: 10063 - DNA, 14 bp, synthetic construct
  source 1..14: mol_type = other DNA
gtcttagtactctg

SEQ ID NO: 10064 - DNA, 14 bp, synthetic construct
  source 1..14: mol_type = other DNA
gtcttagtactctg

SEQ ID NO: 10065 - DNA, 14 bp, synthetic construct
  source 1..14: mol_type = other DNA
gtcttagtactctg

SEQ ID NO: 10066 - DNA, 14 bp, synthetic construct
  source 1..14: mol_type = other DNA
gtcttagtactctg

SEQ ID NO: 10067 - DNA, 12 bp, synthetic construct
  source 1..12: mol_type = other DNA
actggggttcag

SEQ ID NO: 10068 - DNA, 12 bp, synthetic construct
  source 1..12: mol_type = other DNA
gttttagtccct

SEQ ID NO: 10069 - DNA, 16 bp, synthetic construct
  source 1..16: mol_type = other DNA
gtcatagttcccctga

SEQ ID NO: 10070 - DNA, 12 bp, synthetic construct
  source 1..12: mol_type = other DNA
gttttagagcta

SEQ ID NO: 10071 - DNA, 24 bp, synthetic construct
  source 1..24: mol_type = other DNA
gttgtagctccctttctcatttcg

SEQ ID NO: 10072 - DNA, 12 bp, synthetic construct
  source 1..12: mol_type = other DNA
gttttagagcta

SEQ ID NO: 10073 - DNA, 12 bp, synthetic construct
  source 1..12: mol_type = other DNA
gttttagagcta

SEQ ID NO: 10074 - DNA, 17 bp, synthetic construct
  source 1..17: mol_type = other DNA
gtttaagagctatgctg

SEQ ID NO: 10075 - DNA, 17 bp, synthetic construct
  source 1..17: mol_type = other DNA
gtttaagagctatgctg

SEQ ID NO: 10076 - DNA, 17 bp, synthetic construct
  source 1..17: mol_type = other DNA
gtttaagagctatgctg

SEQ ID NO: 10077 - DNA, 12 bp, synthetic construct
  source 1..12: mol_type = other DNA
gttttagagcta

SEQ ID NO: 10078 - DNA, 12 bp, synthetic construct
  source 1..12: mol_type = other DNA
gttttagagcta

SEQ ID NO: 10079 - DNA, 12 bp, synthetic construct
  source 1..12: mol_type = other DNA
gttttagagcta

SEQ ID NO: 10080 - DNA, 12 bp, synthetic construct
  source 1..12: mol_type = other DNA
gttttagagcta

SEQ ID NO: 10081 - DNA, 12 bp, synthetic construct
  source 1..12: mol_type = other DNA
gttttagagcta

SEQ ID NO: 10082 - DNA, 17 bp, synthetic construct
  source 1..17: mol_type = other DNA
gtttaagagctatgctg

SEQ ID NO: 10083 - DNA, 17 bp, synthetic construct
  source 1..17: mol_type = other DNA
gtttaagagctatgctg

SEQ ID NO: 10084 - DNA, 14 bp, synthetic construct
  source 1..14: mol_type = other DNA
gtctttgtactctg

SEQ ID NO: 10085 - DNA, 14 bp, synthetic construct
  source 1..14: mol_type = other DNA
gtctttgtactctg

SEQ ID NO: 10086 - DNA, 14 bp, synthetic construct
  source 1..14: mol_type = other DNA
gtctttgtactctg

SEQ ID NO: 10087 - DNA, 14 bp, synthetic construct
  source 1..14: mol_type = other DNA
gtctttgtactctg

SEQ ID NO: 10088 - DNA, 14 bp, synthetic construct
  source 1..14: mol_type = other DNA
gttttagtactctg

SEQ ID NO: 10089 - DNA, 14 bp, synthetic construct
  source 1..14: mol_type = other DNA
gttttagtactctg

SEQ ID NO: 10090-10150 - skipped (61 entries)

SEQ ID NO: 10151 - DNA, 93 bp, synthetic construct
  source 1..93: mol_type = other DNA
cgaaatgagaaccgttgctacaataaggccgtctgaaaagatgtgccgcaacgctctgccccttaaagcttctgctttaaggggcatcgttta

SEQ ID NO: 10152 - DNA, 82 bp, synthetic construct
  source 1..82: mol_type = other DNA
gcgaaatgaaaaacgttgttacaataagagatgaatttctcgcaaagctctgcctcttgaaatttcggtttcaagaggcatc

SEQ ID NO: 10153 - DNA, 58 bp, synthetic construct
  source 1..58: mol_type = other DNA
cagaatctactaaaacaaggcaaaatgccgtgtttatctcgtcaacttgttggcgaga

SEQ ID NO: 10154 - DNA, 58 bp, synthetic construct; identical to SEQ ID NO: 10153
  source 1..58: mol_type = other DNA

SEQ ID NO: 10155 - DNA, 58 bp, synthetic construct; identical to SEQ ID NO: 10153
  source 1..58: mol_type = other DNA

SEQ ID NO: 10156 - DNA, 58 bp, synthetic construct; identical to SEQ ID NO: 10153
  source 1..58: mol_type = other DNA

SEQ ID NO: 10157 - DNA, 60 bp, synthetic construct
  source 1..60: mol_type = other DNA
tagcaagttaaaataaggctagtccgttatcaacttgaaaaagtggcaccgagtcggtgc

SEQ ID NO: 10158 - DNA, 60 bp, synthetic construct; identical to SEQ ID NO: 10157
  source 1..60: mol_type = other DNA

SEQ ID NO: 10159 - DNA, 60 bp, synthetic construct; identical to SEQ ID NO: 10157
  source 1..60: mol_type = other DNA

SEQ ID NO: 10160 - DNA, 60 bp, synthetic construct; identical to SEQ ID NO: 10157
  source 1..60: mol_type = other DNA

SEQ ID NO: 10161 - DNA, 66 bp, synthetic construct
  source 1..66: mol_type = other DNA
cagaagctacaaagataaggcttcatgccgaaatcaacaccctgtcattttatggcagggtgtttt

SEQ ID NO: 10162 - DNA, 127 bp, synthetic construct
  source 1..127: mol_type = other DNA
ggtaagttgctatagtaagggcaacagacccgaggcgttggggatcgcctagcccgtgtttacgggctctccccatattcaaaataatgacagacgagcaccttggagcatttatctccgaggtgct

SEQ ID NO: 10163 - DNA, 58 bp, synthetic construct
  source 1..58: mol_type = other DNA
cagaatctactaagacaaggcaaaatgccgtgtttatctcgtcaacttgttggcgaga

SEQ ID NO: 10164 - DNA, 58 bp, synthetic construct; identical to SEQ ID NO: 10163
  source 1..58: mol_type = other DNA

SEQ ID NO: 10165 - DNA, 58 bp, synthetic construct; identical to SEQ ID NO: 10163
  source 1..58: mol_type = other DNA

SEQ ID NO: 10166 - DNA, 58 bp, synthetic construct; identical to SEQ ID NO: 10163
  source 1..58: mol_type = other DNA

SEQ ID NO: 10167 - DNA, 76 bp, synthetic construct
  source 1..76: mol_type = other DNA
ctgaacctcagtaagcattggctcgtttccaatgttgattgctccgccggtgctccttatttttaagggcgccggc

SEQ ID NO: 10168 - DNA, 57 bp, synthetic construct
  source 1..57: mol_type = other DNA
agggactaaaataaagagtttgcgggactctgcggggttacaatcccctaaaaccgc

SEQ ID NO: 10169 - DNA, 98 bp, synthetic construct
  source 1..98: mol_type = other DNA
tcagggttactatgataagggctttctgcctaaggcagactgacccgcggcgttggggatcgcctgtcgcccgcttttggcgggcattccccatcctt

SEQ ID NO: 10170 - DNA, 60 bp, synthetic construct; identical to SEQ ID NO: 10157
  source 1..60: mol_type = other DNA

SEQ ID NO: 10171 - DNA, 93 bp, synthetic construct; identical to SEQ ID NO: 10151
  source 1..93: mol_type = other DNA

SEQ ID NO: 10172 - DNA, 60 bp, synthetic construct; identical to SEQ ID NO: 10157
  source 1..60: mol_type = other DNA

SEQ ID NO: 10173 - DNA, 60 bp, synthetic construct; identical to SEQ ID NO: 10157
  source 1..60: mol_type = other DNA

SEQ ID NO: 10174 - DNA, 65 bp, synthetic construct
  source 1..65: mol_type = other DNA
cagcatagcaagtttaaataaggctagtccgttatcaacttgaaaaagtggcaccgagtcggtgc

SEQ ID NO: 10175 - DNA, 65 bp, synthetic construct; identical to SEQ ID NO: 10174
  source 1..65: mol_type = other DNA

SEQ ID NO: 10176 - DNA, 65 bp, synthetic construct; identical to SEQ ID NO: 10174
  source 1..65: mol_type = other DNA

SEQ ID NO: 10177 - DNA, 60 bp, synthetic construct; identical to SEQ ID NO: 10157
  source 1..60: mol_type = other DNA

SEQ ID NO: 10178 - DNA, 60 bp, synthetic construct; identical to SEQ ID NO: 10157
  source 1..60: mol_type = other DNA

SEQ ID NO: 10179 - DNA, 60 bp, synthetic construct; identical to SEQ ID NO: 10157
  source 1..60: mol_type = other DNA

SEQ ID NO: 10180 - DNA, 60 bp, synthetic construct; identical to SEQ ID NO: 10157
  source 1..60: mol_type = other DNA

SEQ ID NO: 10181 - DNA, 60 bp, synthetic construct; identical to SEQ ID NO: 10157
  source 1..60: mol_type = other DNA

SEQ ID NO: 10182 - DNA, 65 bp, synthetic construct; identical to SEQ ID NO: 10174
  source 1..65: mol_type = other DNA

SEQ ID NO: 10183 - DNA, 65 bp, synthetic construct; identical to SEQ ID NO: 10174
  source 1..65: mol_type = other DNA

SEQ ID NO: 10184 - DNA, 66 bp, synthetic construct; identical to SEQ ID NO: 10161
  source 1..66: mol_type = other DNA

SEQ ID NO: 10185 - DNA, 66 bp, synthetic construct; identical to SEQ ID NO: 10161
  source 1..66: mol_type = other DNA

SEQ ID NO: 10186 - DNA, 66 bp, synthetic construct; identical to SEQ ID NO: 10161
  source 1..66: mol_type = other DNA

SEQ ID NO: 10187 - DNA, 66 bp, synthetic construct; identical to SEQ ID NO: 10161
  source 1..66: mol_type = other DNA

SEQ ID NO: 10188 - DNA, 62 bp, synthetic construct
  source 1..62: mol_type = other DNA
cagaatctactgaaacaagacaatatgtcgtgtttatcccatcaatttattggtgggatttt

SEQ ID NO: 10189 - DNA, 62 bp, synthetic construct; identical to SEQ ID NO: 10188
  source 1..62: mol_type = other DNA

SEQ ID NO: 10190-10192 - skipped (3 entries)

SEQ ID NO: 10193 - DNA, 68 bp, synthetic construct
  source 1..68: mol_type = other DNA
tagcaagttaaaataaggctagtccgttatcaacttggacttcggtccaagtggcaccgagtcggtgc

SEQ ID NO: 10194 - DNA, 68 bp, synthetic construct
  source 1..68: mol_type = other DNA
tagcaagttaaaataaggctagtccgttatcaacttggagcttgctccaagtggcaccgagtcggtgc

SEQ ID NO: 10195 - DNA, 76 bp, synthetic construct
  source 1..76: mol_type = other DNA
gttttagagctagaaatagcaagttaaaataaggctagtccgttatcgacttgaaaaagtcgcaccgagtcggtgc

SEQ ID NO: 10196-11000 - skipped (805 entries)

SEQ ID NO: 11001 - protein, 1367 aa, unidentified
DKKYSIGLDIGTNSVGWAVITDEYKVPSKKFKVLGNTDRHSIKKNLIGALLFDSGETAEATRLKRTARRRYTRRKNRICYLQEIFSNEMAKVDDSFFHRLEESFLVEEDKKHERHPIFGNIVDEVAYHEKYPTIYHLRKKLVDSTDKADLRLIYLALAHMIKFRGHFLIEGDLNPDNSDVDKLFIQLVQTYNQLFEENPINASGVDAKAILSARLSKSRRLENLIAQLPGEKKNGLFGNLIALSLGLTPNFKSNFDLAEDAKLQLSKDTYDDDLDNLLAQIGDQYADLFLAAKNLSDAILLSDILRVNTEITKAPLSASMIKRYDEHHQDLTLLKALVRQQLPEKYKEIFFDQSKNGYAGYIDGGASQEEFYKFIKPILEKMDGTEELLVKLNREDLLRKQRTFDNGSIPHQIHLGELHAILRRQEDFYPFLKDNREKIEKILTFRIPYYVGPLARGNSRFAWMTRKSEETITPWNFEEVVDKGASAQSFIERMTNFDKNLPNEKVLPKHSLLYEYFTVYNELTKVKYVTEGMRKPAFLSGEQKKAIVDLLFKTNRKVTVKQLKEDYFKKIECFDSVEISGVEDRFNASLGTYHDLLKIIKDKDFLDNEENEDILEDIVLTLTLFEDREMIEERLKTYAHLFDDKVMKQLKRRRYTGWGRLSRKLINGIRDKQSGKTILDFLKSDGFANRNFMQLIHDDSLTFKEDIQKAQVSGQGDSLHEHIANLAGSPAIKKGILQTVKVVDELVKVMGRHKPENIVIEMARENQTTQKGQKNSRERMKRIEEGIKELGSQILKEHPVENTQLQNEKLYLYYLQNGRDMYVDQELDINRLSDYDVDAIVPQSFLKDDSIDNKVLTRSDKNRGKSDNVPSEEVVKKMKNYWRQLLNAKLITQRKFDNLTKAERGGLSELDKAGFIKRQLVETRQITKHVAQILDSRMNTKYDENDKLIREVKVITLKSKLVSDFRKDFQFYKVREINNYHHAHDAYLNAVVGTALIKKYPKLESEFVYGDYKVYDVRKMIAKSEQEIGKATAKYFFYSNIMNFFKTEITLANGEIRKRPLIETNGETGEIVWDKGRDFATVRKVLSMPQVNIVKKTEVQTGGFSKESILPKRNSDKLIARKKDWDPKKYGGFDSPTVAYSVLVVAKVEKGKSKKLKSVKELLGITIMERSSFEKNPIDFLEAKGYKEVKKDLIIKLPKYSLFELENGRKRMLASAGELQKGNELALPSKYVNFLYLASHYEKLKGSPEDNEQKQLFVEQHKHYLDEIIEQISEFSKRVILADANLDKVLSAYNKHRDKPIREQAENIIHLFTLTNLGAPAAFKYFDTTIDRKRYTSTKEVLDATLIHQSITGLYETRIDLSQLGGD

SEQ ID NO: 11002-11094 - skipped (93 entries)

SEQ ID NO: 11095 - protein, 9 aa, synthetic construct
PAAKRVKLD

SEQ ID NO: 11096 - protein, 1367 aa, synthetic construct
DKKYSIGLDIGTNSVGWAVITDEYKVPSKKFKVLGNTDRHSIKKNLIGALLFDSGETAEATRLKRTARRRYTRRKNRICYLQEIFSNEMAKVDDSFFHRLEESFLVEEDKKHERHPIFGNIVDEVAYHEKYPTIYHLRKKLVDSTDKADLRLIYLALAHMIKFRGHFLIEGDLNPDNSDVDKLFIQLVQTYNQLFEENPINASGVDAKAILSARLSKSRRLENLIAQLPGEKKNGLFGNLIALSLGLTPNFKSNFDLAEDAKLQLSKDTYDDDLDNLLAQIGDQYADLFLAAKNLSDAILLSDILRVNTEITKAPLSASMIKRYDEHHQDLTLLKALVRQQLPEKYKEIFFDQSKNGYAGYIDGGASQEEFYKFIKPILEKMDGTEELLVKLNREDLLRKQRTFDNGSIPHQIHLGELHAILRRQEDFYPFLKDNREKIEKILTFRIPYYVGPLARGNSRFAWMTRKSEETITPWNFEEVVDKGASAQSFIERMTNFDKNLPNEKVLPKHSLLYEYFTVYNELTKVKYVTEGMRKPAFLSGEQKKAIVDLLFKTNRKVTVKQLKEDYFKKIECFDSVEISGVEDRFNASLGTYHDLLKIIKDKDFLDNEENEDILEDIVLTLTLFEDREMIEERLKTYAHLFDDKVMKQLKRRRYTGWGRLSRKLINGIRDKQSGKTILDFLKSDGFANRNFMQLIHDDSLTFKEDIQKAQVSGQGDSLHEHIANLAGSPAIKKGILQTVKVVDELVKVMGRHKPENIVIEMARENQTTQKGQKNSRERMKRIEEGIKELGSQILKEHPVENTQLQNEKLYLYYLQNGRDMYVDQELDINRLSDYDVDHIVPQSFLKDDSIDNKVLTRSDKARGKSDNVPSEEVVKKMKNYWRQLLNAKLITQRKFDNLTKAERGGLSELDKAGFIKRQLVETRQITKHVAQILDSRMNTKYDENDKLIREVKVITLKSKLVSDFRKDFQFYKVREINNYHHAHDAYLNAVVGTALIKKYPKLESEFVYGDYKVYDVRKMIAKSEQEIGKATAKYFFYSNIMNFFKTEITLANGEIRKRPLIETNGETGEIVWDKGRDFATVRKVLSMPQVNIVKKTEVQTGGFSKESILPKRNSDKLIARKKDWDPKKYGGFDSPTVAYSVLVVAKVEKGKSKKLKSVKELLGITIMERSSFEKNPIDFLEAKGYKEVKKDLIIKLPKYSLFELENGRKRMLASAGELQKGNELALPSKYVNFLYLASHYEKLKGSPEDNEQKQLFVEQHKHYLDEIIEQISEFSKRVILADANLDKVLSAYNKHRDKPIREQAENIIHLFTLTNLGAPAAFKYFDTTIDRKRYTSTKEVLDATLIHQSITGLYETRIDLSQLGGD

SEQ ID NO: 11097 - protein, 10 aa, synthetic construct
KRTADGSEFE

SEQ ID NO: 11098 - protein, 19 aa, synthetic construct
KRTADGSEFESPKKKAKVE

SEQ ID NO: 11099 - protein, 29 aa, synthetic construct
KRTADGSEFEKRTADGSEFESPKKKAKVE

SEQ ID NO: 11100-14999 - skipped (3900 entries)

SEQ ID NO: 15000 - RNA, 127 nt, synthetic construct
  source 1..127: mol_type = other RNA
gctggtacacggcagggtcagttttagagctagaaatagcaagttaaaataaggctagtccgttatcaacttgaaaaagtggcaccgagtcggtgcgatatccagaaccctgatagtgccctgccgt

SEQ ID NO: 15001 - RNA, 127 nt, synthetic construct; identical to SEQ ID NO: 15000
  source 1..127: mol_type = other RNA
  modified_base 1: mod_base = OTHER; note = 2'-O-methyl nucleotide with internucleotide phosphorothioate linkage
  modified_base 2: mod_base = OTHER; note = 2'-O-methyl nucleotide with internucleotide phosphorothioate linkage
  modified_base 3: mod_base = OTHER; note = 2'-O-methyl nucleotide with internucleotide phosphorothioate linkage
  modified_base 29: mod_base = OTHER; note = 2'-O-methyl nucleotide
  modified_base 30: mod_base = OTHER; note = 2'-O-methyl nucleotide
  modified_base 31: mod_base = OTHER; note = 2'-O-methyl nucleotide
  modified_base 32: mod_base = OTHER; note = 2'-O-methyl nucleotide
  modified_base 33: mod_base = OTHER; note = 2'-O-methyl nucleotide
  modified_base 34: mod_base = OTHER; note = 2'-O-methyl nucleotide
  modified_base 35: mod_base = OTHER; note = 2'-O-methyl nucleotide
  modified_base 36: mod_base = OTHER; note = 2'-O-methyl nucleotide
  modified_base 37: mod_base = OTHER; note = 2'-O-methyl nucleotide
  modified_base 38: mod_base = OTHER; note = 2'-O-methyl nucleotide
  modified_base 39: mod_base = OTHER; note = 2'-O-methyl nucleotide
  modified_base 40: mod_base = OTHER; note = 2'-O-methyl nucleotide
  modified_base 69: mod_base = OTHER; note = 2'-O-methyl nucleotide
  modified_base 70: mod_base = OTHER; note = 2'-O-methyl nucleotide
  modified_base 71: mod_base = OTHER; note = 2'-O-methyl nucleotide
  modified_base 72: mod_base = OTHER; note = 2'-O-methyl nucleotide
  modified_base 73: mod_base = OTHER; note = 2'-O-methyl nucleotide
  modified_base 74: mod_base = OTHER; note = 2'-O-methyl nucleotide
  modified_base 75: mod_base = OTHER; note = 2'-O-methyl nucleotide
  modified_base 76: mod_base = OTHER; note = 2'-O-methyl nucleotide
  modified_base 77: mod_base = OTHER; note = 2'-O-methyl nucleotide
  modified_base 78: mod_base = OTHER; note = 2'-O-methyl nucleotide
  modified_base 79: mod_base = OTHER; note = 2'-O-methyl nucleotide
  modified_base 80: mod_base = OTHER; note = 2'-O-methyl nucleotide
  modified_base 81: mod_base = OTHER; note = 2'-O-methyl nucleotide
  modified_base 82: mod_base = OTHER; note = 2'-O-methyl nucleotide
  modified_base 83: mod_base = OTHER; note = 2'-O-methyl nucleotide
  modified_base 84: mod_base = OTHER; note = 2'-O-methyl nucleotide
  modified_base 85: mod_base = OTHER; note = 2'-O-methyl nucleotide
  modified_base 86: mod_base = OTHER; note = 2'-O-methyl nucleotide
  modified_base 87: mod_base = OTHER; note = 2'-O-methyl nucleotide
  modified_base 88: mod_base = OTHER; note = 2'-O-methyl nucleotide
  modified_base 89: mod_base = OTHER; note = 2'-O-methyl nucleotide
  modified_base 90: mod_base = OTHER; note = 2'-O-methyl nucleotide
  modified_base 91: mod_base = OTHER; note = 2'-O-methyl nucleotide
  modified_base 92: mod_base = OTHER; note = 2'-O-methyl nucleotide
  modified_base 93: mod_base = OTHER; note = 2'-O-methyl nucleotide
  modified_base 94: mod_base = OTHER; note = 2'-O-methyl nucleotide
  modified_base 95: mod_base = OTHER; note = 2'-O-methyl nucleotide
  modified_base 96: mod_base = OTHER; note = 2'-O-methyl nucleotide
  modified_base 124: mod_base = OTHER; note = internucleotide phosphorothioate linkage
  modified_base 125: mod_base = OTHER; note = 2'-O-methyl nucleotide with internucleotide phosphorothioate linkage
  modified_base 126: mod_base = OTHER; note = 2'-O-methyl nucleotide with internucleotide phosphorothioate linkage
  modified_base 127: mod_base = OTHER; note = 2'-O-methyl nucleotide

SEQ ID NO: 15002 - protein, 1020 aa, synthetic construct
MDEYQRSLSRPLLTIMSINIEGLSLAKEELLAKMSEDISCDILCIQETHRDITMRRPKILGMQLAVERPHRQYGSAIFVRSGVAISATSLTEVNNIEILSVELDSCTVSSLYKPPGADFYFTPPTSCHNHEAHFVVGDFNSHSCVWGYDEDDRNGEAVLTWADNSRMSLLHDSKLPPSFNSGRWKRGYNPDLIFVKESISHQCTKRVLNPIPNTQHRPICCVAYAAVRPKSVPFRRRYNFNKANWTKFTETLEAAISDIEPSIENYDLFVEAVKRSSRLSIPRGCRTSYLPGLNEESLNQLQEYLRLFQENPYSDGTIAAGQKLSTALANAKKDRWIELLENLDMSKSSRKAWQLLRRLDSDPLVNPGHANVTPDQIAHQLIQNGKTNCSRIKMKINRVPELETHQLSSPLNLKELREAIKRCKTGKAPGLDDLMMEQIKHLGAKAENWLLKFYNQCLAHKQIPRAWRKTKIIAILKPGKDASNARNYRPISLLCHLYKVYERMLLNRLGPVIEPKLIAQQAGFRPGKNCTGQILHLTEHIEEGYEKGCITGTVFVDLTAAYDTVQHRKMLHKVYHITRDFDFTKTVQTLLENRSFYVEFQGQKSRWRRQKNGLPQGSVLAPTLFNIFTNDQPQPPLTKSFIYADDLGLTTQAKDFETVEKQLTNALKDLSSYYKENHLKPNPAKTQVCAFHLRNREANRKLKVTWEGQELEHCFHPKYLGVTLDRTLTYRKHCMNTKHKVAARNNILRKLTGSAWGADPQVIRTSALALSFSTAEYACPVWHKSAHAKQVDIALNETCRIITGCLKPTPVDKLYKLAGIAPPDVRREVAANGERKKVEHCESHPLHGYHPPPTRLKSRKGFMRTTTPLDVPPAAARVSLWAAKPGNSNWMAPQEGLPPGANQEWATWKSLNRLRSGVGRSKDNLARWHYLEESSTLCDCGAEQTTQHMYACPQCPASCTEEELFKATDNAVAVARFWSKTIGGGSPKKKRKVSGSETPGTSESATPESVSGWRLFKKIS

SEQ ID NO: 15003 - protein, 1137 aa, synthetic construct
MDSTAHPNQGRGLEKVSQTLPALQTPGQHTAAGGSSPLSGRNQRKNTKKLLLGAWNIRTLLDRENTPRPERRTALIGKELARYNIDIAALSETRLPEEGSLSEPTTGYTFFWKGRASNEDRIHGVGLAIKTSLLKQLPDLPVGISERLMKIRLPLSKDRYATIISAYAPTLTSTEETIEQFYSDLSAVLHSVPTNDKLILLGDFNARVGQDHERWKGVLGKHGVGKMNNNGLLLLSKCSEFELTITNTVFRMANKYKTTWMHPRSKQWHLIDYIIVRRRDIQDVKITRAMRGAECWTDHRLVRATLQMRIAPRHPKRAQTVRAFYNVSRLRDPSYLQTFQSCLDDKLSAKGPLTGSSTEKWNQFRDAVKETSKAVLGPKQRNHQDWFDENNTAIEDLLSKKNKAFMEWQNNPNSAPKKDRFKSLQATAQREIRKMQDRWWEKKAEEIQRFADMKNYKQFFSALKTVYGPLKPTTTPLLSSDGDTLIKDKKGISNRWKEHFSQLLNRPSSVDQSALDQIPQNRTIEQLDVPPSIEEVQKAIKQMSAGKAPGKDGIPTEVYKALNGKALQAFHIVLTSIWEEEDMPPELRDASIVALYKNKGSRAACDNYRGISLLSTAGKILARVILNRLLSSVSEQNLPESQCGFRPDRSTIDMVFTVRQMQEKCLEQNLSLYIVFIDLTKAFDTVNRDALWVILSKLGCPAKFVKLIQLFHVDMTGEVLSGGETSDRFNISNGVKQGCVLAPVLFNLFFTQVLRHAVMDLDLGVYIKYRLDGSLFDLRRLTAKTKTTERLILEALFADDCALMAHQENHLQTIVDRFSTATKLFGLTISLSKTEVLFQPAPGRPTNQPCITIDGTQLSNVNTFKYLGSTIANDGSLDHEINARIQKASQALGRLRCKVLQHRGVSTATKLKVYNAVVLSSLLYGCETWTLYRKHMKQLEQFHQRSLRSIMRIRWQDRITNQEVLDRANSTSIEVMVLKTQLRWSGHVIRMDPQRIPRQVFYGELSAGLRKQGRPKKRFKDQLKSNLKWAGITPKQLELAASDRSSWRTHINHAATTFEDERRRRLAAARERRHQATTAPPVTTGVPCPMCHKLCASAFGLQSHMRVHRRSGSETPGTSESATPESVSGWRLFKKIS

SEQ ID NO: 15004 - RNA, 123 nt, synthetic construct
  source 1..123: mol_type = other RNA
  modified_base 1: mod_base = OTHER; note = 2'-O-methyl nucleotide with internucleotide phosphorothioate linkage
  modified_base 2: mod_base = OTHER; note = 2'-O-methyl nucleotide with internucleotide phosphorothioate linkage
  modified_base 3: mod_base = OTHER; note = 2'-O-methyl nucleotide with internucleotide phosphorothioate linkage
  modified_base 29: mod_base = OTHER; note = 2'-O-methyl nucleotide
  modified_base 30: mod_base = OTHER; note = 2'-O-methyl nucleotide
  modified_base 31: mod_base = OTHER; note = 2'-O-methyl nucleotide
  modified_base 32: mod_base = OTHER; note = 2'-O-methyl nucleotide
  modified_base 33: mod_base = OTHER; note = 2'-O-methyl nucleotide
  modified_base 34: mod_base = OTHER; note = 2'-O-methyl nucleotide
  modified_base 35: mod_base = OTHER; note = 2'-O-methyl nucleotide
  modified_base 36: mod_base = OTHER; note = 2'-O-methyl nucleotide
  modified_base 37: mod_base = OTHER; note = 2'-O-methyl nucleotide
  modified_base 38: mod_base = OTHER; note = 2'-O-methyl nucleotide
  modified_base 39: mod_base = OTHER; note = 2'-O-methyl nucleotide
  modified_base 40: mod_base = OTHER; note = 2'-O-methyl nucleotide
  modified_base 69: mod_base = OTHER; note = 2'-O-methyl nucleotide
  modified_base 70: mod_base = OTHER; note = 2'-O-methyl nucleotide
  modified_base 71: mod_base = OTHER; note = 2'-O-methyl nucleotide
  modified_base 72: mod_base = OTHER; note = 2'-O-methyl nucleotide
  modified_base 73: mod_base = OTHER; note = 2'-O-methyl nucleotide
  modified_base 74: mod_base = OTHER; note = 2'-O-methyl nucleotide
  modified_base 75: mod_base = OTHER; note = 2'-O-methyl nucleotide
  modified_base 76: mod_base = OTHER; note = 2'-O-methyl nucleotide
  modified_base 77: mod_base = OTHER; note = 2'-O-methyl nucleotide
  modified_base 78: mod_base = OTHER; note = 2'-O-methyl nucleotide
  modified_base 79: mod_base = OTHER; note = 2'-O-methyl nucleotide
  modified_base 80: mod_base = OTHER; note = 2'-O-methyl nucleotide
  modified_base 81: mod_base = OTHER; note = 2'-O-methyl nucleotide
  modified_base 82: mod_base = OTHER; note = 2'-O-methyl nucleotide
  modified_base 83: mod_base = OTHER; note = 2'-O-methyl nucleotide
  modified_base 84: mod_base = OTHER; note = 2'-O-methyl nucleotide
  modified_base 85: mod_base = OTHER; note = 2'-O-methyl nucleotide
  modified_base 86: mod_base = OTHER; note = 2'-O-methyl nucleotide
  modified_base 87: mod_base = OTHER; note = 2'-O-methyl nucleotide
  modified_base 88: mod_base = OTHER; note = 2'-O-methyl nucleotide
  modified_base 89: mod_base = OTHER; note = 2'-O-methyl nucleotide
  modified_base 90: mod_base = OTHER; note = 2'-O-methyl nucleotide
  modified_base 91: mod_base = OTHER; note = 2'-O-methyl nucleotide
  modified_base 92: mod_base = OTHER; note = 2'-O-methyl nucleotide
  modified_base 93: mod_base = OTHER; note = 2'-O-methyl nucleotide
  modified_base 94: mod_base = OTHER; note = 2'-O-methyl nucleotide
  modified_base 95: mod_base = OTHER; note = 2'-O-methyl nucleotide
  modified_base 96: mod_base = OTHER; note = 2'-O-methyl nucleotide
  modified_base 120: mod_base = OTHER; note = internucleotide phosphorothioate linkage
  modified_base 121: mod_base = OTHER; note = 2'-O-methyl nucleotide with internucleotide phosphorothioate linkage
  modified_base 122: mod_base = OTHER; note = 2'-O-methyl nucleotide with internucleotide phosphorothioate linkage
  modified_base 123: mod_base = OTHER; note = 2'-O-methyl nucleotide
gagaatcaaaatcggtgaatgttttagagctagaaatagcaagttaaaataaggctagtccgttatcaacttgaaaaagtggcaccgagtcggtgcctgtctgcctatttagtgcaccgattt

SEQ ID NO: 15005 - RNA, 125 nt, synthetic construct
  source 1..125: mol_type = other RNA
  modified_base 1: mod_base = OTHER; note = 2'-O-methyl nucleotide with internucleotide phosphorothioate linkage
  modified_base 2: mod_base = OTHER; note = 2'-O-methyl nucleotide with internucleotide phosphorothioate linkage
  modified_base 3: mod_base = OTHER; note = 2'-O-methyl nucleotide with internucleotide phosphorothioate linkage
  modified_base 29: mod_base = OTHER; note = 2'-O-methyl nucleotide
  modified_base 30: mod_base = OTHER; note = 2'-O-methyl nucleotide
  modified_base 31: mod_base = OTHER; note = 2'-O-methyl nucleotide
  modified_base 32: mod_base = OTHER; note = 2'-O-methyl nucleotide
  modified_base 33: mod_base = OTHER; note = 2'-O-methyl nucleotide
  modified_base 34: mod_base = OTHER; note = 2'-O-methyl nucleotide
  modified_base 35: mod_base = OTHER; note = 2'-O-methyl nucleotide
  modified_base 36: mod_base = OTHER; note = 2'-O-methyl nucleotide
  modified_base 37: mod_base = OTHER; note = 2'-O-methyl nucleotide
  modified_base 38: mod_base = OTHER; note = 2'-O-methyl nucleotide
  modified_base 39: mod_base = OTHER; note = 2'-O-methyl nucleotide
  modified_base 40: mod_base = OTHER; note = 2'-O-methyl nucleotide
  modified_base 69: mod_base = OTHER; note = 2'-O-methyl nucleotide
  modified_base 70: mod_base = OTHER; note = 2'-O-methyl nucleotide
  modified_base 71: mod_base = OTHER; note = 2'-O-methyl nucleotide
  modified_base 72: mod_base = OTHER; note = 2'-O-methyl nucleotide
  modified_base 73: mod_base = OTHER; note = 2'-O-methyl nucleotide
  modified_base 74: mod_base = OTHER; note = 2'-O-methyl nucleotide
  modified_base 75: mod_base = OTHER; note = 2'-O-methyl nucleotide
  modified_base 76: mod_base = OTHER; note = 2'-O-methyl nucleotide
  modified_base 77: mod_base = OTHER; note = 2'-O-methyl nucleotide
  modified_base 78: mod_base = OTHER; note = 2'-O-methyl nucleotide
  modified_base 79: mod_base = OTHER; note = 2'-O-methyl nucleotide
  modified_base 80: mod_base = OTHER; note = 2'-O-methyl nucleotide
  modified_base 81: mod_base = OTHER; note = 2'-O-methyl nucleotide
  modified_base 82: mod_base = OTHER; note = 2'-O-methyl nucleotide
  modified_base 83: mod_base = OTHER; note = 2'-O-methyl nucleotide
  modified_base 84: mod_base = OTHER; note = 2'-O-methyl nucleotide
  modified_base 85: mod_base = OTHER; note = 2'-O-methyl nucleotide
  modified_base 86: mod_base = OTHER; note = 2'-O-methyl nucleotide
  modified_base 87: mod_base = OTHER; note = 2'-O-methyl nucleotide
  modified_base 88: mod_base = OTHER; note = 2'-O-methyl nucleotide
  modified_base 89: mod_base = OTHER; note = 2'-O-methyl nucleotide
  modified_base 90: mod_base = OTHER; note = 2'-O-methyl nucleotide
  modified_base 91: mod_base = OTHER; note = 2'-O-methyl nucleotide
  modified_base 92: mod_base = OTHER; note = 2'-O-methyl nucleotide
  modified_base 93: mod_base = OTHER; note = 2'-O-methyl nucleotide
  modified_base 94: mod_base = OTHER; note = 2'-O-methyl nucleotide
  modified_base 95: mod_base = OTHER; note = 2'-O-methyl nucleotide
  modified_base 96: mod_base = OTHER; note = 2'-O-methyl nucleotide
  modified_base 122: mod_base = OTHER; note = internucleotide phosphorothioate linkage
  modified_base 123: mod_base = OTHER; note = 2'-O-methyl nucleotide with internucleotide phosphorothioate linkage
  modified_base 124: mod_base = OTHER; note = 2'-O-methyl nucleotide with internucleotide phosphorothioate linkage
  modified_base 125: mod_base = OTHER; note = 2'-O-methyl nucleotide
actcacgctggatagcctccgttttagagctagaaatagcaagttaaaataaggctagtccgttatcaacttgaaaaagtggcaccgagtcggtgctttctggcctggatgatgggctatccagc

SEQ ID NO: 15006 - RNA, 123 nt, synthetic construct; identical to SEQ ID NO: 15004
  source 1..123: mol_type = other RNA

SEQ ID NO: 15007 - RNA, 125 nt, synthetic construct; identical to SEQ ID NO: 15005
  source 1..125: mol_type = other RNA

SEQ ID NO: 15008 - protein, 2122 aa, synthetic construct
MPAAKRVKLDGGDKKYSIGLDIGTNSVGWAVITDEYKVPSKKFKVLGNTDRHSIKKNLIGALLFDSGETAEATRLKRTARRRYTRRKNRICYLQEIFSNEMAKVDDSFFHRLEESFLVEEDKKHERHPIFGNIVDEVAYHEKYPTIYHLRKKLVDSTDKADLRLIYLALAHMIKFRGHFLIEGDLNPDNSDVDKLFIQLVQTYNQLFEENPINASGVDAKAILSARLSKSRRLENLIAQLPGEKKNGLFGNLIALSLGLTPNFKSNFDLAEDAKLQLSKDTYDDDLDNLLAQIGDQYADLFLAAKNLSDAILLSDILRVNTEITKAPLSASMIKRYDEHHQDLTLLKALVRQQLPEKYKEIFFDQSKNGYAGYIDGGASQEEFYKFIKPILEKMDGTEELLVKLNREDLLRKQRTFDNGSIPHQIHLGELHAILRRQEDFYPFLKDNREKIEKILTFRIPYYVGPLARGNSRFAWMTRKSEETITPWNFEEVVDKGASAQSFIERMTNFDKNLPNEKVLPKHSLLYEYFTVYNELTKVKYVTEGMRKPAFLSGEQKKAIVDLLFKTNRKVTVKQLKEDYFKKIECFDSVEISGVEDRFNASLGTYHDLLKIIKDKDFLDNEENEDILEDIVLTLTLFEDREMIEERLKTYAHLFDDKVMKQLKRRRYTGWGRLSRKLINGIRDKQSGKTILDFLKSDGFANRNFMQLIHDDSLTFKEDIQKAQVSGQGDSLHEHIANLAGSPAIKKGILQTVKVVDELVKVMGRHKPENIVIEMARENQTTQKGQKNSRERMKRIEEGIKELGSQILKEHPVENTQLQNEKLYLYYLQNGRDMYVDQELDINRLSDYDVDHIVPQSFLKDDSIDNKVLTRSDKARGKSDNVPSEEVVKKMKNYWRQLLNAKLITQRKFDNLTKAERGGLSELDKAGFIKRQLVETRQITKHVAQILDSRMNTKYDENDKLIREVKVITLKSKLVSDFRKDFQFYKVREINNYHHAHDAYLNAVVGTALIKKYPKLESEFVYGDYKVYDVRKMIAKSEQEIGKATAKYFFYSNIMNFFKTEITLANGEIRKRPLIETNGETGEIVWDKGRDFATVRKVLSMPQVNIVKKTEVQTGGFSKESILPKRNSDKLIARKKDWDPKKYGGFDSPTVAYSVLVVAKVEKGKSKKLKSVKELLGITIMERSSFEKNPIDFLEAKGYKEVKKDLIIKLPKYSLFELENGRKRMLASAGELQKGNELALPSKYVNFLYLASHYEKLKGSPEDNEQKQLFVEQHKHYLDEIIEQISEFSKRVILADANLDKVLSAYNKHRDKPIREQAENIIHLFTLTNLGAPAAFKYFDTTIDRKRYTSTKEVLDATLIHQSITGLYETRIDLSQLGGDSGGSSGGSSGSETPGTSESATPESSGGSSGGSSTLNIEDEYRLHETSKEPDVSLGSTWLSDFPQAWAETGGMGLAVRQAPLIIPLKATSTPVSIKQYPMSQEARLGIKPHIQRLLDQGILVPCQSPWNTPLLPVKKPGTNDYRPVQDLREVNKRVEDIHPTVPNPYNLLSGLPPSHQWYTVLDLKDAFFCLRLHPTSQPLFAFEWRDPEMGISGQLTWTRLPQGFKNSPTLFNEALHRDLADFRIQHPDLILLQYVDDLLLAATSELDCQQGTRALLQTLGNLGYRASAKKAQICQKQVKYLGYLLKEGQRWLTEARKETVMGQPTPKTPRQLREFLGKAGFCRLFIPGFAEMAAPLYPLTKPGTLFNWGPDQQKAYQEIKQALLTAPALGLPDLTKPFELFVDEKQGYAKGVLTQKLGPWRRPVAYLSKKLDPVAAGWPPCLRMVAAIAVLTKDAGKLTMGQPLVILAPHAVEALVKQPPDRWLSNARMTHYQALLLDTDRVQFGPVVALNPATLLPLPEEGLQHNCLDILAEAHGTRPDLTDQPLPDADHTWYTDGSSLLQEGQRKAGAAVTTETEVIWAKALPAGTSAQRAELIALTQALKMAEGKKLNVYTDSRYAFATAHIHGEIYRRRGWLTSEGKEIKNKDEILALLKALFLPKRLSIIHCPGHQKGHSAEARGNRMADQAARKAAITETPDTSTLLIENSSPSGGSKRTADGSEFEKRTADGSEFESPKKKAKVE

SEQ ID NO: 15009 - RNA, 1268 nt, synthetic construct
  source 1..1268: mol_type = other RNA
gggggacacggaaagagcctccccgaagattgagtgaattcagtcgggcgtcccctgggcaacgtttcttgtaagcggccgatctttccaccccaaaagcattggatgagtttacggatccgaattctcgacggatcgatccgaacaaacgacccaacacccgtgcgttttattctgtctttttattgccgatcccccggccgctttacttgtacagctcgtccatgccgagagtgatcccggcggcggtcacgaactccagcaggaccatgtgatcgcgcttctcgttggggtctttgctcagggcggactgggtgctcaggtagtggttgtcgggcagcagcacggggccgtcgccgatgggggtgttctgctggtagtggtcggcgagctgcacgctgccgtcctcgatgttgtggcggatcttgaagttcaccttgatgccgttcttctgcttgtcggccatgatatagacgttgtggctgttgtagttgtactccagcttgtgccccaggatgttgccgtcctccttgaagtcgatgcccttcagctcgatgcggttcaccagggtgtcgccctcgaacttcacctcggcgcgggtcttgtagttgccgtcgtccttgaagaagatggtgcgctcctggacgtagccttcgggcatggcggacttgaagaagtcgtgctgcttcatgtggtcggggtagcggctgaagcactgcacgccgtaggtcagggtggtcacgagggtgggccagggcacgggcagcttgccggtggtgcagatgaacttcagggtcagcttgccgtaggtggcatcgccctcgccctcgccggacacgctgaacttgtggccgtttacgtcgccgtccagctcgaccaggatgggcaccaccccggtgaacagctcctcgcccttgctcaccatggtggctttaccaacagtaccggaatgccaagcttgggtcctgtgttctggcggcaaacccgttgcgaaaaagaacgttcacggcgactactgcacttatatacggttctcccccaccctcgggaaaaaggcggagccagtacacgacatcactttcccagtttaccccgcgccaccttctctaggcaccggatcaattgccgacccctccccccaacttctcggggactgtgggcgatgtgcgctctgccctagttgcttgtgatttcttttcttttttattttatttccattatttgaaatgtatttgttgtagcaatgcttttgacacgaaataaataaa

SEQ ID NO: 15010 - RNA, 1829 nt, synthetic construct
  source 1..1829: mol_type = other RNA
gggtgtatggggtgctcagggaggggtagtatctctggtatggagggcttgtcgtgccctcctagggcagctctccagcctctgacccccacctgacacccagctctcacttgtggctcccagtagctgctagcatgtggcagcggccacaccccgggcaacggcttcgacaggccggctaaaccttgtgagggtagccatcgggtcatcgacccctggtgaaccagggctttgctcacccagcatgtgaagactgcttcggctgaacagacggaagaaaccaataagaaggttcaacggctgagagggcgacgcagcaaagcactgtggagtgcttagggcgtgttggagcacaaaggacaacacggccatccaatgcagctgaggaagtctccagatgtaacaatttttcgtgccactggacccaggcttccaacgccgagagagtgggactgtctctgtgcatcggcttttccacttaaatctctttcacgcacaagtatctttgtgcacactcatctatcctaaccccgtccaccctcttcaagacctgcggcgatgggggagtggcgacgcaacaggtggaggtgaccactggcagttgtagtcacgatcctgcacgtaggcggcccacggaccagtggtcgctcggccctgtgggcagcagggacgttcggcagcatcctgggcgactgagcagccctctctaggtttacggatccgaattctcgacggatcgatccgaacaaacgacccaacacccgtgcgttttattctgtctttttattgccgatcccccggccgctttacttgtacagctcgtccatgccgagagtgatcccggcggcggtcacgaactccagcaggaccatgtgatcgcgcttctcgttggggtctttgctcagggcggactgggtgctcaggtagtggttgtcgggcagcagcacggggccgtcgccgatgggggtgttctgctggtagtggtcggcgagctgcacgctgccgtcctcgatgttgtggcggatcttgaagttcaccttgatgccgttcttctgcttgtcggccatgatatagacgttgtggctgttgtagttgtactccagcttgtgccccaggatgttgccgtcctccttgaagtcgatgcccttcagctcgatgcggttcaccagggtgtcgccctcgaacttcacctcggcgcgggtcttgtagttgccgtcgtccttgaagaagatggtgcgctcctggacgtagccttcgggcatggcggacttgaagaagtcgtgctgcttcatgtggtcggggtagcggctgaagcactgcacgccgtaggtcagggtggtcacgagggtgggccagggcacgggcagcttgccggtggtgcagatgaacttcagggtcagcttgccgtaggtggcatcgccctcgccctcgccggacacgctgaacttgtggccgtttacgtcgccgtccagctcgaccaggatgggcaccaccccggtgaacagctcctcgcccttgctcaccatggtggctttaccaacagtaccggaatgccaagcttgggtcctgtgttctggcggcaaacccgttgcgaaaaagaacgttcacggcgactactgcacttatatacggttctcccccaccctcgggaaaaaggcggagccagtacacgacatcactttcccagtttaccccgcgccaccttctctaggcaccggatcaattgccgacccctccccccaacttctcggggactgtgggcgatgtgcgctctgccctgaaactgcacaaagacaatagtcattctcgatcaccgagagactaccact

SEQ ID NO: 15011 - RNA, 2766 nt, synthetic construct
  source 1..2766: mol_type = other RNA
gggtgtatggggtgctcagggaggggtagtatctctggtatggagggcttgtcgtgccctcctagggcagctctccagcctctgacccccacctgacacccagctctcacttgtggctcccagtagctgctagcatgtggcagcggccacaccccgggcaacggcttcgacaggccggctaaaccttgtgagggtagccatcgggtcatcgacccctggtgaaccagggctttgctcacccagcatgtgaagactgcttcggctgaacagacggaagaaaccaataagaaggttcaacggctgagagggcgacgcagcaaagcactgtggagtgcttagggcgtgttggagcacaaaggacaacacggccatccaatgcagctgaggaagtctccagatgtaacaatttttcgtgccactggacccaggcttccaacgccgagagagtgggactgtctctgtgcatcggcttttccacttaaatctctttcacgcacaagtatctttgtgcacactcatctatcctaaccccgtccaccctcttcaagacctgcggcgatgggggagtggcgacgcaacaggtggaggtgaccactggcagttgtagtcacgatcctgcacgtaggcggcccacggaccagtggtcgctcggccctgtgggcagcagggacgttcggcagcatcctgggcgactgagcagccctctctaggtttacggatccgaattctcgacggatcgatccgaacaaacgacccaacacccgtgcgttttattctgtctttttattgccgatcccccggccgctttagcggggtggcaaggcttgcatatgcaacgcatcataagtgtccttggtggctgtagagagaccctggtacagaccgtcatgccccttgcctctgcgtctttcgcctttcattccgatctcgctataggcttcagccatcttgtccttctgcagctcattgtacaacccctcctgaggattttttctccggggctttccccccatctcgggatccctgccccgtctcttgtccagaacatcgtactcttctcgcctgccgagattcaattcattgtagagctgattctgaccctgctgatatgcgggagcatcggcgcttctagaaaatttcaccctggagcgataggctgcgaagtcgcgtggtggggcatagggctggtaatgcttgcgggtgggcccggggcggcggggagtcatgttcatgtagtcactgtgcaggagcctgctcctcttactcctacaatacagagtgatcacaagggagagaagcaacaccccacatgttccggccaaaggggcccaaatataaatatcacacgcgaagtccaggcctcgcgtatggacggcgcctcctgctgcgggcctgcaagcttcaggtctgaggctcaatggttggctggctatagttggagcgggtgtggggggccttggagcaggtgttgtggtcttgatctccagtttggtcccctgaccgaaagtccaggggacgtgactggtctctgcacaatagtagacgccgacgtcctcagcctcgacccgactaatcttcagggtgaaatcggcaccgctacctgagccggaaaagcgatccgggaccccgctgaaacggttggaaaccttgtagatcaggagctgtggactttggcccggcttctgcagataccagtgcaggtaggtgttgccgttagagtggaccagactctgggaactcttgcaggagatgctcgccggctcaccaggggtcacagacagagacagtggagtctgggtcatcacgatatcgctgccaccccctccagagccacctccgccggagccaccgccaccggaagacactgtcaccatggtgccctggccccagacgtcgaagtaccagtcataatcatacagggaggcgcagaaatacacggcggtatcttcggacctgagactagacagctccatgtatgccgtagaacttgacgtgtcgcgggtcatggtaaccctgccggtgaacttctggttgtactcagagtttccgctcgcaaaatagatccaacccatccactcgagtccctgcccgggagcctgccgcacccaattgatatagtaatctgggaagctgtagccggaagccttacagctcactttcacgctggcgccaggcttttttacctccgcgccggactgaacaagctgcacctgcgggcgagcggcatgcaagagcagggcaagaggcagaagcagggcggtcaccggcagagccatggtggctttaccaacagtaccggaatgccaagcttgggtctgggctcttttattgagctcggggagcagaagcgcgcgaacagaagcgagaagcgaactgattggttagttcaaataaggcacagggtcatttcaggtccttggggcaccctggaaacatctgatggttctctagaaactgctgagggcgggaccgcatctggggaccatctgttcttggccctgagccggggcaggaactgcttaccacagatatcctgtttggcccatattctgctgttccaactgttcttggccctgagccggggcaggaactgcttaccacagatatcctgtttggcccatattctgctgtctctctgttcctaaccttgatcctagcttgccaaacctacaggtggggtctttcattcccccctttttctggagactaaataaatgaaactgcacaaagacaatagtcattctcgatcaccgagagactaccact

SEQ ID NO: 15012 - RNA, 3672 nt, synthetic construct
  source 1..3672: mol_type = other RNA
aggaaataagagagaaaagaagagtaagaagaaatataagagccaccatgccaaagaagaaaagaaaagtaggaggttccgactccacagctcatcccaaccagggacgtggcctggagaaggtgtcccagactctgcctgcgctgcagaccccagggcagcacactgccgctgggggatcctctcccctgtccggcaggaatcagcggaagaacaccaaaaagctgttgctgggcgcctggaacatccgcaccctgctcgaccgcgaaaatactccccgtcctgaaagacgcacggcactgattgggaaagagctcgccagatataacatcgacatcgctgccctgtccgaaacccgcctgccagaggaaggatctctgagcgagcctaccactggctacacgttcttttggaagggcagagcaagcaacgaggaccgtatccatggtgtaggcctggctatcaagacctctctcctgaaacaactcccagatctgccagtcggcatctcagagagactgatgaagatcaggcttcctctctcaaaagaccgctacgcaaccatcatttccgcatacgcgccgaccctgactagcaccgaggaaaccattgagcagttctactctgatctttcagctgttttgcactccgtgcctaccaacgacaagctgatcctcctgggcgacttcaacgctcgcgtgggtcaggaccatgagcgctggaaaggcgtgctgggtaagcatggcgtgggtaagatgaacaataacggcctcctgctcctgtctaagtgtagcgaattcgagctgactattaccaacactgtttttcgtatggctaacaagtacaaaactacatggatgcaccccaggagcaagcagtggcacctgattgactacattatcgtgcgtaggcgggatatccaggacgtgaagattacccgtgcaatgcgcggcgctgagtgctggacagaccatcgcctggtgagagctactctccagatgaggatcgcaccgcgtcaccctaagcgcgcccagaccgtgcgggccttttacaacgtatcacggcttcgggatccttcctaccttcagacatttcaatcttgcctcgatgacaagctctctgctaagggtcccctcaccggatcttcaacagagaagtggaaccaattccgcgatgcggtgaaggaaaccagcaaagcagtcctgggaccgaagcagcgcaaccaccaagactggtttgacgaaaataacactgccatcgaagacctcctgtctaaaaagaacaaagcatttatggagtggcagaataacccaaacagtgcacccaagaaagaccgtttcaaaagcctgcaggccaccgcgcagcgcgagatccggaagatgcaggaccgctggtgggaaaaaaaggccgaagagatccagaggttcgcggatatgaaaaactacaagcagttctttagcgcactgaagaccgtgtacggacctctcaaacccaccacgactcccctgctctcttccgatggtgacactctcatcaaggacaaaaagggaatcagcaaccgctggaaagaacacttttctcaacttctcaaccgcccaagctccgtggaccagagcgctctggaccagatcccgcagaaccgtaccatcgagcagctggacgtgcctccctccatcgaagaggtccagaaggctatcaagcagatgtctgctgggaaggctcctggcaaggatgggatcccaacagaggtctataaagctctcaacggaaaggcgctgcaggcctttcacattgtcctgacctccatctgggaggaagaggacatgccacctgaacttagggacgcctctattgtggccctgtacaagaataagggcagccgcgcagcttgtgataactatcgtggcatctcactcctgagtacagctggcaagattctggctcgtgtgatcctgaaccggttgctgagttccgtttccgagcagaacctgcccgaatcacagtgcggcttccgccccgatcggtccaccatcgatatggtgttcaccgtgcgtcagatgcaggagaagtgcctggaacagaatctgagcctgtacatcgttttcatcgatctgactaaggccttcgacacggtgaaccgcgatgccctgtgggtgatcctgagcaagctggggtgccccgctaagttcgtaaagctcatccagttgttccacgttgatatgacgggagaggtcctgtccggtggagaaacctccgaccggtttaacatctccaatggcgtgaaacagggctgcgtcctggccccagtgctgttcaacctgtttttcacacaggtgctgagacatgcggttatggatcttgacctgggtgtgtatatcaagtatcgcttggacggcagtctgttcgatctcagacgcctgacagctaagactaagactaccgagcgcctcattctcgaagccctgtttgccgacgattgtgcccttatggcccaccaggagaaccacctgcagacgattgtcgaccgcttctctacagcgaccaagctgttcggcctcaccatctccctctcaaagaccgaagtcctgtttcagcccgcacccgggagacccacgaatcagccgtgcattaccattgacgggacccaactttccaacgtcaacaccttcaagtatctgggatctaccatcgccaatgatggcagcctggatcatgaaatcaacgcaaggatccaaaaggctagccaggcactgggccgcctccggtgcaaggtcctgcagcaccggggcgtttccactgccactaaactgaaggtgtacaacgctgtcgtgctctcttccctgctttatggctgcgaaacatggactctgtaccggaagcatatgaaacagcttgagcagttccaccagaggagcttgcgtagcatcatgaggatccgctggcaggaccgcatcaccaaccaggaggtgctggacagggctaattccaccagcatcgaagttatggtgctgaagacccagctccgttggtctggccatgtcattcggatggaccctcagcgtatcccccgccaggtattctacggggaactgtctgcggggctcagaaagcagggccgcccaaagaaacgctttaaggatcagctgaaaagcaatctgaagtgggccggcatcacccccaagcagctggagctggcggcatctgaccgctccagctggcgcacccacattaaccacgcagctactacctttgaggacgaacgccggcgcagactggccgctgcacgcgagaggcgccaccaagccactaccgcccctcccgtgaccactggggtcccttgccctatgtgccacaagctgtgtgcgtctgccttcggtttgcagtcccacatgcgtgtgcatcgccgcagcggcagcgagactcccgggacctcagagtccgccacacccgaaagtgtgagcggctggcggctgttcaagaagattagctgagctggagcctcggtggccatgcttcttgccccttgggcctccccccagcccctcctccccttcctgcacccgtacccccgtggtctttgaataaagtctgaaaaaaaaaaaaaaaaaaaaaaaaaaaaaaaaaaaaaaaaaaaaaaaaaaaaaaaaaaaaaaaaaaaaaaaaaaaaaaaaa

SEQ ID NO: 15013 - protein, 1147 aa, synthetic construct
MPKKKRKVGGSDSTAHPNQGRGLEKVSQTLPALQTPGQHTAAGGSSPLSGRNQRKNTKKLLLGAWNIRTLLDRENTPRPERRTALIGKELARYNIDIAALSETRLPEEGSLSEPTTGYTFFWKGRASNEDRIHGVGLAIKTSLLKQLPDLPVGISERLMKIRLPLSKDRYATIISAYAPTLTSTEETIEQFYSDLSAVLHSVPTNDKLILLGDFNARVGQDHERWKGVLGKHGVGKMNNNGLLLLSKCSEFELTITNTVFRMANKYKTTWMHPRSKQWHLIDYIIVRRRDIQDVKITRAMRGAECWTDHRLVRATLQMRIAPRHPKRAQTVRAFYNVSRLRDPSYLQTFQSCLDDKLSAKGPLTGSSTEKWNQFRDAVKETSKAVLGPKQRNHQDWFDENNTAIEDLLSKKNKAFMEWQNNPNSAPKKDRFKSLQATAQREIRKMQDRWWEKKAEEIQRFADMKNYKQFFSALKTVYGPLKPTTTPLLSSDGDTLIKDKKGISNRWKEHFSQLLNRPSSVDQSALDQIPQNRTIEQLDVPPSIEEVQKAIKQMSAGKAPGKDGIPTEVYKALNGKALQAFHIVLTSIWEEEDMPPELRDASIVALYKNKGSRAACDNYRGISLLSTAGKILARVILNRLLSSVSEQNLPESQCGFRPDRSTIDMVFTVRQMQEKCLEQNLSLYIVFIDLTKAFDTVNRDALWVILSKLGCPAKFVKLIQLFHVDMTGEVLSGGETSDRFNISNGVKQGCVLAPVLFNLFFTQVLRHAVMDLDLGVYIKYRLDGSLFDLRRLTAKTKTTERLILEALFADDCALMAHQENHLQTIVDRFSTATKLFGLTISLSKTEVLFQPAPGRPTNQPCITIDGTQLSNVNTFKYLGSTIANDGSLDHEINARIQKASQALGRLRCKVLQHRGVSTATKLKVYNAVVLSSLLYGCETWTLYRKHMKQLEQFHQRSLRSIMRIRWQDRITNQEVLDRANSTSIEVMVLKTQLRWSGHVIRMDPQRIPRQVFYGELSAGLRKQGRPKKRFKDQLKSNLKWAGITPKQLELAASDRSSWRTHINHAATTFEDERRRRLAAARERRHQATTAPPVTTGVPCPMCHKLCASAFGLQSHMRVHRRSGSETPGTSESATPESVSGWRLFKKIS

SEQ ID NO: 15014 - RNA, 3304 nt, synthetic construct
  source 1..3304: mol_type = other RNA
aggaaataagagagaaaagaagagtaagaagaaatataagagccaccatggacgagtaccagcgctccttgtcccgccccctgttgacaatcatgagtattaatatcgaaggcttgagcctcgcgaaagaggaactgcttgccaagatgtccgaggacatcagctgcgacattctgtgcatccaagagacccatcgcgacatcaccatgcgtcgccccaagatcctcggtatgcagcttgcggtggagcgccctcaccgccagtacggctccgcgattttcgtgcgttccggtgtggccatttctgctaccagcctcaccgaggttaacaatattgagatcctgtcagtggagctcgattcctgtaccgtctccagtctgtacaaacctcccggtgcagacttctactttactcccccgacgtcttgccacaaccatgaggctcattttgtggttggtgatttcaattcccactcctgcgtgtggggctatgacgaggatgaccgcaacggcgaagctgttctgacctgggccgataattcccgcatgtccctgctccacgatagtaagctgcctccctccttcaacagtgggagatggaagcgcgggtacaaccctgatcttatcttcgtcaaagaatccatctctcatcagtgtaccaagcgcgtcctcaacccgattcctaacactcagcaccgccccatttgttgcgtagcatatgctgccgtgcgtcccaagtctgtccccttcagaaggagatacaacttcaacaaggctaactggaccaagtttaccgaaaccttggaagcggcaatctccgacattgagccatctatcgagaattatgatctcttcgttgaggcagtcaagcggtcctctcgcctgagtatcccccgtggatgtaggacctcctacctgcccggcctgaacgaagagtcactcaatcagctgcaggaatacctgcgcctgttccaagagaatccttactccgatggcaccatcgctgccggacaaaaactgagcaccgctctggcgaatgctaagaaagaccgctggatcgagctgctcgagaacctggacatgtccaagtctagccggaaagcttggcagctcctgcgccggctggacagcgaccccctcgtgaatcctggccatgccaatgtaacgccggaccagatcgcccatcaactgatccagaacggcaagaccaattgcagtagaatcaagatgaagatcaacagagtacccgagttggaaacacaccagctgtctagtcctctcaacctcaaagagctccgcgaagcaatcaaaaggtgtaagacgggcaaagctcccggtctggatgacctgatgatggaacagatcaaacacttgggggccaaggctgagaactggttgctgaaattctacaaccagtgcctggctcacaagcagatcccccgtgcgtggcgcaagactaagattatcgccatcttgaagccgggcaaggatgctagtaacgcccgcaactaccgtcctatttccctcctgtgtcacctttacaaggtgtacgagcgcatgctcctgaaccgcttgggccccgtcatcgagcctaaactgatcgcccaacaggctggtttccgcccaggtaagaactgcactggacagatcctgcaccttacggagcacatcgaggaaggttacgagaagggctgcatcaccggaaccgtcttcgtggacctgactgcggcctacgacacggttcagcacagaaaaatgctccacaaggtatatcatattacccgggatttcgacttcaccaaaacagtgcagacgcttctggagaatcgctccttttacgtcgagttccagggtcagaaaagtcggtggaggcgccagaagaacggcttgccccagggtagcgtgctcgccccaaccctgtttaatatcttcaccaacgaccagccacagcccccgctgacaaaatcctttatctatgccgacgatcttggcctgaccacgcaagccaaggactttgagacagtcgagaaacagctcacaaacgcactcaaggacctgagttcctattacaaggagaaccatctcaaacctaaccccgctaagacacaggtctgcgcttttcacctgaggaatcgggaggccaaccgtaaactgaaggtgacatgggagggacaggaactggagcactgtttccaccccaagtatttgggcgtgactctcgatcgcacccttacgtatcggaagcactgcatgaacactaagcataaggtggcggccagaaataacatcctgcgtaaactcacaggaagcgcctggggcgccgacccacaggtcatccgtaccagtgctctggccctgtctttctccactgctgaatatgcgtgtccggtgtggcacaagtccgcccacgcgaagcaggtggatattgccctgaacgagacatgccggattatcactggttgcctcaagcctacccccgtcgacaagctctataagttggccggcattgcaccccctgatgtccgtcgcgaagtcgcagccaatggcgagcggaaaaaggtagaacactgcgaatcacatccgctgcatggatatcatccccctcccacccggcttaagagccgtaagggcttcatgcgcacaaccactccgctggatgtgcctcccgctgccgcgcgcgtgagtctgtgggccgctaagcccggtaattccaattggatggcaccgcaagagggcctcccgcccggagccaatcaagagtgggccacatggaagtccttgaacaggctgcgctccggtgtgggacgctctaaggacaacctggcccgttggcactatctggaagagtcatccaccctgtgcgactgtggtgctgaacagactacccagcacatgtacgcttgcccccaatgccctgcctcctgcacggaagaggaactctttaaggcaaccgataacgcagtggcagtggcgcgcttttggagtaagacaatcggcggcggctcccccaagaagaagcggaaggtgagcggcagcgagactcccgggacctcagagtccgccacacccgaaagtgtgagcggctggcggctgttcaagaagattagctgattaattaagctggagcctcggtggccatgcttcttgccccttgggcctccccccagcccctcctccccttcctgcacccgtacccccgtggtctttgaataaagtctgatctagaaaaaaaaaaaaaaaaaaaaaaaaaaaaaaaaaaaaaaaaaaaaaaaaaaaaaaaaaaaaaaaaaaaaaaaaaaaaaaaa

SEQ ID NO: 15015 - RNA, 3287 nt, synthetic construct
  source 1..3287: mol_type = other RNA
aggaaataagagagaaaagaagagtaagaagaaatataagagccaccatgctgtataccatcttcctcgtttatgggatcctgtgttttttctttgtgtatttctgcatctacctgtacatcactgtttatctttgttttctgttctttctgtttctgcttctgtgcggtgacgtggaaagcaatcctggaccaggcagagcccgtggatgtcggttgctgtattgcaacatccgcggtctgcatgctaatctggccgagctggactttgttagtcgcggggtggacgtggtctgctgttccgagactctggtggctgggcgtcgccacgatgccgagttggccctcgctggcttccagtccccctttcgtaggctctgtggctcaggccctggcttccgtggcatggcggtgtacgtcaggtctgggttctgtgcctaccggcagagtgtgcacgaatgtgcctgccacgagattatcgtcgttcgcgtgtgtggacgtctgaacaattactatctgttctctctctaccgctccccggccaccgatgactccctttacgattgccttctgactgccatggccagcatccagtccactgatccgaaggcagccttcgtcttcgttggcgacgtaaacgcacatcaccgggactggctgggaagcgcctctccaacagattgtcacggcgtcgccgctctggacttttgcaccctttccagctgcgtgcaactcgtccgtgggtccactcatatcgctggaaactgtctggatctggtgatgaccgacgtgcctgacctgatgaccgtgaccgtcggatccccgattggaagtagcgaccactcccacctggtggtctcactggatctcaaccaggtcgtgcctgttgtggatacacgcagggttgtgttcgtgaaaagccgcgccaactgggtcgccatcactcgcgctgtgaggactctgccttggcggcagattatccactccgaggaccctgtaagtgagctcaatgacctgaccgtgtctattctggaacgctttgttcccaagcgcaccatcctcgtgagaagccgcgataagccttggttcgatgaccagtgtagactggctttcgaggctaagcaggcggcttaccgtgcttggcgtaggagtcgggaccgcacgttgtggcagacctatgtggacaggcgggccgaggccaagcgcgtgtatgaagaggctcagaggcgccttcgccagaggagccgtgaaagcctgctcagtattgaccaccctcatcgctggtggtcagagctcaagggctccgtgttcggcgccgaacccagcctgccccctctcgttggtcctggcggtggaatcattaccgatcccctcgccagggccgagctgctctccgcacattttgatggaaagcagtcacgcgatgtcatcgccttgccccacggttgccacccggagccccgcctcacatctctggccttcaggtccggcgctatcaaggtcctcctggaaggactcgacccctacggtggcgttgaccccgtcggcatgtttcctctgttttacaagcagctggcggacgtcctggccccaaagttggccgttatctttcgtcggctgatccgcctcggcaactttccccgctgctggcgcactggtaatatcactcccatccccaagggccccgtgagtccttacgtggccaattaccgtcccatcaccttgacacctatcctgtctaaggttttcgaaaagctgatcgcaggcaagctgggtcgctttgctgaagtcactggcttgctccctgctggtcagtttgcttatcgcatcggtctgggctgctgtgacgctctcctgtccgtgagccatcacctgcagtccgccctggactgccgctccgaagcccgcctggtgcagctcgatttctccgcagcgtttgaccgcgttaatcacaggggtcttctgtataaattggagtccttcggcgtcgggggccgggtgctgtcaattatccgtgatttcgtatccgagcgcacccagtctgtatccgtggacggtgttctgtccgccagcgtcggcgtggttagcggagtcccccagggtagcgtgctgggacctctgctctttgtattgtatacgtccgacatgttctctagcctggagaataccctcattaactatgcagatgactccactttgatggcagttattccggccccacgcctgcgtgacgccgtagcgcagtccctgaatagggacctgtcacgcatcagtgcctggtgttcagcttggtccatgaagctgaacgcgtccaagaccaaaagcatgattatctcaaggtccaggactttggtgcctcaacacccccagctggagatcgacgatactttgctgcaggagtcctcatccctggaaatcctgggcgtcgtgttcgatgagaagctcaccttcgagcctcacatcaggcggctggtgagccgcgcgtctaccaagatcgggctgctccgcaaggtgaactccgtgttcggcgattcccaggtcgcgaggcgttgcttttacgctttcctgctccctgtgctggagtactgctctccggtatgggcgagtgccgcggatacccatcttcgtcttctggaccgccttgtctccagcgccagccgtttgtgtgctgacaacgatctggtgaacctgagtcaccgtcggcgcgtggctgagctgtgtatgttctacaaggtgtacaataacgagaggcattggctgtactcatccctgccagccctgaaggtcttcgggcgcgaaacgcgtgccgcgtgcggtgctcactcttttacgttggaggcggttcgctgtcgcaccaaccagttctgccgctgctttgtgccttggtctgcgaaggtgtggaacctgctccctgcctccgctttcgggagaatcggtctgcaggcatttaaaagcgctgtgaacggtttcctgttggactttctgggcggcggctcccccaagaagaagcggaaggtgagcggcagcgagactcccgggacctcagagtccgccacacccgaaagtgtgagcggctggcggctgttcaagaagattagctgattaattaagctgccttctgcggggcttgccttctggccatgcccttcttctctcccttgcacctgtacctcttggtctttgaataaagcctgagtaggaagtctagaaaaaaaaaaaaaaaaaaaaaaaaaaaaaaaaaaaaaaaaaaaaaaaaaaaaaaaaaaaaaaaaaaaaaaaaaaaaaaaa

SEQ ID NO: 15016 - RNA, 3729 nt, synthetic construct
  source 1..3729: mol_type = other RNA
aggaaataagagagaaaagaagagtaagaagaaatataagagccaccatgccaaagaagaaaagaaaagtaggaggttccagcggcacaccaagagtggcatttgacagcggaaaggacctcagaaatcccatagggcagtccccacctgccctcagccgggctgcccccggacagttggggacagacccctcacgttccgcatgttttatagggtgcctggagcttcgagtcctgttggacaaatggatcgtgtgccgagctcctgataagcaggaatccaaggagaaacgccgccagaaaactcagcctatacggattggaagctggaacgtcagaacaatgcggacaggcctgtctgatgacttgacagttatcgaggacatccgtaaaacagccgcaattgaccgcgaactttatcgcctgaatattgacattgttgcgctgcaagaaacgcgtttgcccgacagcggttctctcaaggaagacagctatactttcttctggcagggtaagggtatggaggaaacaagggagcacggcgtggggtttgccgtgagaaacactttgctccacatgattgagcctcccacgggtggtaccgagcgcatcattacacttcgtttaagtacccatgagggccctgtgaatctcctctgtgtttacgctcccaccctgcaggcgacatcagaggtcaaagatcaattttacgggcagttagactccgctatcaagaagatacccgtcagcgagcacatttttatcttgggagactttaacgcccgggtcgggacggaccaggagtcatggcagaccgtgctcggacatcacgggattgggaaaatgaacgaaaacgggcagcggctgctcgaactatgttgctatcacaacctgtgcgtcaccaataccttcttccagaataaagccattcataaagctagttggagacatcccagaagtcaacgatggcaccagctagacttggtaatcaccaggcggacaagcctcaattccgtttgcaataccagggcctatcattccgcggactgtgatactgatcacagcctgatcgctgcgagaatcaagctgaggcctaagaaactgcaccatatgaagaagaaaggccagccaaagatcgatgtgtctaaaactatgctccccgacaggaaccagaagttccttgaatgcctggaaggcacactcaacaacatccaaccgcaggatgcagagcacaggtgggagaccctgtccaagaccatctacagcgccgccgcacagtcctatggcaagaaggagcggaagaacacagactggttcgaggcttatatctctgagcttgagcctgtgatggatacgaagaggaaagccctggtgagttataagcagaatcccagctcacaaaatctgcaggccctgaaggctgcccgccaggaagctcagagagcctcacgacgatgcgccaacaactactggttgctactgtctgagagaattcaactagcgtccgcgaccggcgatattcgccgcatgtatgagggcatcaagcaagccaccggtaaacctatcaaaaaatctgccccccttaaggctaaatccggcgagattataaccgataaggacaagcaaatggctcgctgggtcgaacactacctggatatttattctacagagaactctgtctctcaggatgccctggataacatcgaggatttttctgtgctggccgaactcgatgctgatccaaccatagaagagttatctaaggctatagactcaatgtcaaacggcaaagcaccaggcgaagacaatattccagccgaaattataaaaagtggtaaatctgtgctccttgaaccgctgcatgaattactgagactgtgttggaaagaggggaaagtcccgcagtcaatgcgaaactcgaaaatcgtaactctgtacaagaataaaggagataggactgactgcaattcctaccgcggcataagcttgttgtctatcgtgggcaaagtattcgctaaagtggtgctaaccaggctgcaggtgctggctgatcgcgtgtacccagagagccagtgtggcttccgagccgagaggagtaccactgacatgatcttttcagtgcggcagcttcaggagaagtgccgcgagcaacaacggcctctgtacatcgcctttattgacttgactaaggcattcgacttagtgagtaggaggggacttttccagctcctgaggaagattggttgtcctccacaactgctggatataattatctcgttccatgaggatatgaagggagtcgttagtttcgatggggaaacaagcgaaccattcgcaattaggtctggcgtcaagcaaggctgcgttctggcacctacgttgtttggcatctttttctccctcctcctgaagtccgcatttgggcacagcactcagggtgtgcacctgcatacccggtctgatgggaagctttttaacctcgcccgcctcagggccaagactaaggtacgctctgtattaatcagagatatgctgttcgcagacgacgcagcgctcgttgctcatgttgaggacgagcttcaacagttattgaatcagttcgcacatgcatgctcagaattcgccctcacaattagtatcaaaaaaactgtcgtgatgggtcaggatgtgccacagcccccagtggtgacgatcggaagtgaggtcctggaggttaccgaccactttacgtaccttggaagcactgtgacctccaacctgtccctagacaaagaaatcgacaggcgcattgcccgggcagccggagtcatgacaaaactgggaacccgagtgtggaataatagtcacctcacgctgaatactaagcttgaagtgtatagatcgtgtgttctgagcacactgctttacgggtccgaaacctggaccacctacgctaagcaggagaatagactggagagctttcaccttaggtgtcttcgtcgaatcctaggcatttcctggagagatcgggttcccaacacaaccgtgttggagagaagctgctcactgagtattcacctcttactgtgccagcggcggctgcggtggctgggccacgtaagcaggatgaaggacggacgtatcccgaaagatattctcttcggggaactggctactggaaagcgtcccgtcggccgcccagctctccgcttcagggacgtatgtaaaagagatttgaaactaactgatatcgatccggcctcctgggaacagatcgcagccgaccgaaaccgttggcgccacactgtgaaggacggactggcaaaagggcaagaaagacggacagagcacttagaatcacggcggcgaaagagaaaggagaagcctcagcagggtaacccaagtgcctttatctgtcctaattgcggcagggactgccatgcgcggataggactgcaatcgcattcaagaagatgtcagccccctagcggcagcgagactcccgggacctcagagtccgccacacccgaaagtgtgagcggctggcggctgttcaagaagattagctgagctggagcctcggtggccatgcttcttgccccttgggcctccccccagcccctcctccccttcctgcacccgtacccccgtggtctttgaataaagtctgaaaaaaaaaaaaaaaaaaaaaaaaaaaaaaaaaaaaaaaaaaaaaaaaaaaaaaaaaaaaaaaaaaaaaaaaaaaaaaaaa

SEQ ID NO: 15017 - protein, 1166 aa, synthetic construct
MPKKKRKVGGSSGTPRVAFDSGKDLRNPIGQSPPALSRAAPGQLGTDPSRSACFIGCLELRVLLDKWIVCRAPDKQESKEKRRQKTQPIRIGSWNVRTMRTGLSDDLTVIEDIRKTAAIDRELYRLNIDIVALQETRLPDSGSLKEDSYTFFWQGKGMEETREHGVGFAVRNTLLHMIEPPTGGTERIITLRLSTHEGPVNLLCVYAPTLQATSEVKDQFYGQLDSAIKKIPVSEHIFILGDFNARVGTDQESWQTVLGHHGIGKMNENGQRLLELCCYHNLCVTNTFFQNKAIHKASWRHPRSQRWHQLDLVITRRTSLNSVCNTRAYHSADCDTDHSLIAARIKLRPKKLHHMKKKGQPKIDVSKTMLPDRNQKFLECLEGTLNNIQPQDAEHRWETLSKTIYSAAAQSYGKKERKNTDWFEAYISELEPVMDTKRKALVSYKQNPSSQNLQALKAARQEAQRASRRCANNYWLLLSERIQLASATGDIRRMYEGIKQATGKPIKKSAPLKAKSGEIITDKDKQMARWVEHYLDIYSTENSVSQDALDNIEDFSVLAELDADPTIEELSKAIDSMSNGKAPGEDNIPAEIIKSGKSVLLEPLHELLRLCWKEGKVPQSMRNSKIVTLYKNKGDRTDCNSYRGISLLSIVGKVFAKVVLTRLQVLADRVYPESQCGFRAERSTTDMIFSVRQLQEKCREQQRPLYIAFIDLTKAFDLVSRRGLFQLLRKIGCPPQLLDIIISFHEDMKGVVSFDGETSEPFAIRSGVKQGCVLAPTLFGIFFSLLLKSAFGHSTQGVHLHTRSDGKLFNLARLRAKTKVRSVLIRDMLFADDAALVAHVEDELQQLLNQFAHACSEFALTISIKKTVVMGQDVPQPPVVTIGSEVLEVTDHFTYLGSTVTSNLSLDKEIDRRIARAAGVMTKLGTRVWNNSHLTLNTKLEVYRSCVLSTLLYGSETWTTYAKQENRLESFHLRCLRRILGISWRDRVPNTTVLERSCSLSIHLLLCQRRLRWLGHVSRMKDGRIPKDILFGELATGKRPVGRPALRFRDVCKRDLKLTDIDPASWEQIAADRNRWRHTVKDGLAKGQERRTEHLESRRRKRKEKPQQGNPSAFICPNCGRDCHARIGLQSHSRRCQPPSGSETPGTSESATPESVSGWRLFKKIS

SEQ ID NO: 15018 - RNA, 3240 nt, synthetic construct
  source 1..3240: mol_type = other RNA
aggaaataagagagaaaagaagagtaagaagaaatataagagccaccatgccccgcaaaaattggaactgcgggcgacgaaccggggatgaaaaacgtaagatgatgtttggatgctggaatgtgcagggaatctcgacaaagatagatctgctgccagcagaactggacatgttcaacattgatgtcgtggtgctctccgagacaaagaggaagggcaagggtgaagaggagttggataattacgttcacatctggtcaggggtctctaaggctgtcagagccaaggctggtgtctccatcatgatacagaaaaagtggaagaaacgtatcactaactggacgttcataaatgagcgcatcataaccgttgaaatgacactgtttgcgcgggaagttgttatcatcggcgtatacgcccccaccaacgacactaaggataaagagaaagacgcgttttgggacactctcagagaaaccatcgaaaaaatccccagaaggaaggaacttatcataatgggtgatatgaatggccgggtggggattagagaatcctgcaagatagtgggcaagcatggagaagcagagtataacgacaatggagagcgtcttattgatatttgcgcccagttcgacttgaagatcactaacacgtttttcaagcacaaggacatccacaagtatacatggcagcaaaacacgaaagagctgagatcgatcatcgattatattattataaggcagacctctagcttcaaagctgctgacgtcagatcataccgtggagctcagtgcggtagcgaccactatctcgtaaaaatgaaaagcttttggccgtggaaaaacgccaccaatgatacaagcaacatcaataagatgaactgttccgagaaggtgcaaaacgtgcatttcaatatcgattccctgcaggacgagagcattcggacatttttcaaggcccgtatggagaggaccttggacgagagtttcgaggggtccacagaagagatctacgagtatataaagacaaaagtcaaaaacgttgcctctgaggtgctgggcatcaaggaaaataatcctaagcgagccgcagagtggtggtctgaagagattgagacatctgtgaaagagaagcgcaatgcattcgtgcagtggctgaacgataagtcagagggtactcgaagtaagtacaaggaaaaaaagaatgaagtggaaaaaaagatcagactagctaaaaatgaagcatgggaacggacctgtgccaatgtgaacagcaagctgggattcggacgcgccaaggaagcgtggtctgtcctcaaagctttacgccaggacaccaagggtaaaagtaacctgcaacttgttactcagaaggagtgggaagagtattttaagaaacttctgaatgaagatcgcgacgagtacctcgaggagggcacagtggaagagaatgaacatcacgatgatgagattctgattagcgaaagcgaagtactccaggtcctgaggacggggaaaaacggcaagtcccctggacctgggaatattaacatggagtttctcaaatacggaggggacaagatcgtaaagctcattcttcagctgttcaacaagatgctacatggcgactctgtgccaaaagagatgaagttggggtatatctccacaatttttaagaaaggcgaccgaaagatttgttcaaattacaggggtatttgtgtaactaacaccctaatgcggatcttcggaaaaattatcaagaataaactggaaaagaactttcggacgcaacaggaacagtgcggttttacagcggggcgctcttgcgtggatcacatcttcaccctgagacagatattggagaagcacagagaaaaaagtaaaaacgtgggacttattttcatagacttagagaaagcatacgacactgtgccccggaaattgttatggcgggccctacacagggcaaatatcaacacatcactgattaaaattatcgagcagatgtacaaagacaacatttgtcaggtgaagatcggcaacaccctgagccagaaatttcgaactagtaaggggctgttgcagggatgccctatgtccccaactctctttaagatctatatcgatatttgtctgcggacctggtcacaaaaatgtaattccatgggtcttgagatccgggatggcgtatatctccatcatttactattcgccgatgatcaagtggttatcgcccaggacggcgaggacgccaattacatgtgtaaccaattagccatagcttacaaaaactggggcctgaagatcaattaccaaaaaactgagtatctgacgaacgacccgcacgaactgagaatcgaggggaagaagattaaaaaggtgaacaccttctgctacttgggcagtatccttgaaaccgaagggaagtcagacagtgagattaataaaaggattagctccggccgtaaggtcatcggcatgctgaattcagttctgtggagccggaacgtcatgaatagaacaaagaaaattatttataagtctatattcgagagcgctgtcctctatggcgctgagacttggacaatcaaccagaaacataccaaaaagctgcaggcactcgagatggacttttggcgacgcagtgcacgcatctctcggaaggaaaaaagacggaacaccgaagtgattaaaaggatggagatcatagagagaattgatgaggtcatggacaggaagaagcttaggtggtacggacacgtcaggaggatggaggataccaggatccccaagttggtgctggagtggcagcctgagggacgccgccgaagagggcgcccagtgactacatggataaaaaacgttcaactgaccatgaacagactcggcgccgaagaagaggacacccaggataggcatacttggcggaatattgtgaataatggcggcggctcccccaagaagaagcggaaggtgagcggcagcgagactcccgggacctcagagtccgccacacccgaaagtgtgagcggctggcggctgttcaagaagattagctgagctggagcctcggtggccatgcttcttgccccttgggcctccccccagcccctcctccccttcctgcacccgtacccccgtggtctttgaataaagtctgaaaaaaaaaaaaaaaaaaaaaaaaaaaaaaaaaaaaaaaaaaaaaaaaaaaaaaaaaaaaaaaaaaaaaaaaaaaaaaaaa

SEQ ID NO: 15019 - RNA, 3667 nt, synthetic construct
  source 1..3667: mol_type = other RNA
aggaaataagagagaaaagaagagtaagaagaaatataagagccaccatggactccacagctcatcccaaccagggacgtggcctggagaaggtgtcccagactctgcctgcgctgcagaccccagggcagcacactgccgctgggggatcctctcccctgtccggcaggaatcagcggaagaacaccaaaaagctgttgctgggcgcctggaacatccgcaccctgctcgaccgcgaaaatactccccgtcctgaaagacgcacggcactgattgggaaagagctcgccagatataacatcgacatcgctgccctgtccgaaacccgcctgccagaggaaggatctctgagcgagcctaccactggctacacgttcttttggaagggcagagcaagcaacgaggaccgtatccatggtgtaggcctggctatcaagacctctctcctgaaacaactcccagatctgccagtcggcatctcagagagactgatgaagatcaggcttcctctctcaaaagaccgctacgcaaccatcatttccgcatacgcgccgaccctgactagcaccgaggaaaccattgagcagttctactctgatctttcagctgttttgcactccgtgcctaccaacgacaagctgatcctcctgggcgacttcaacgctcgcgtgggtcaggaccatgagcgctggaaaggcgtgctgggtaagcatggcgtgggtaagatgaacaataacggcctcctgctcctgtctaagtgtagcgaattcgagctgactattaccaacactgtttttcgtatggctaacaagtacaaaactacatggatgcaccccaggagcaagcagtggcacctgattgactacattatcgtgcgtaggcgggatatccaggacgtgaagattacccgtgcaatgcgcggcgctgagtgctggacagaccatcgcctggtgagagctactctccagatgaggatcgcaccgcgtcaccctaagcgcgcccagaccgtgcgggccttttacaacgtatcacggcttcgggatccttcctaccttcagacatttcaatcttgcctcgatgacaagctctctgctaagggtcccctcaccggatcttcaacagagaagtggaaccaattccgcgatgcggtgaaggaaaccagcaaagcagtcctgggaccgaagcagcgcaaccaccaagactggtttgacgaaaataacactgccatcgaagacctcctgtctaaaaagaacaaagcatttatggagtggcagaataacccaaacagtgcacccaagaaagaccgtttcaaaagcctgcaggccaccgcgcagcgcgagatccggaagatgcaggaccgctggtgggaaaaaaaggccgaagagatccagaggttcgcggatatgaaaaactacaagcagttctttagcgcactgaagaccgtgtacggacctctcaaacccaccacgactcccctgctctcttccgatggtgacactctcatcaaggacaaaaagggaatcagcaaccgctggaaagaacacttttctcaacttctcaaccgcccaagctccgtggaccagagcgctctggaccagatcccgcagaaccgtaccatcgagcagctggacgtgcctccctccatcgaagaggtccagaaggctatcaagcagatgtctgctgggaaggctcctggcaaggatgggatcccaacagaggtctataaagctctcaacggaaaggcgctgcaggcctttcacattgtcctgacctccatctgggaggaagaggacatgccacctgaacttagggacgcctctattgtggccctgtacaagaataagggcagccgcgcagcttgtgataactatcgtggcatctcactcctgagtacagctggcaagattctggctcgtgtgatcctgaaccggttgctgagttccgtttccgagcagaacctgcccgaatcacagtgcggcttccgccccgatcggtccaccatcgatatggtgttcaccgtgcgtcagatgcaggagaagtgcctggaacagaatctgagcctgtacatcgttttcatcgatctgactaaggccttcgacacggtgaaccgcgatgccctgtgggtgatcctgagcaagctggggtgccccgctaagttcgtaaagctcatccagttgttccacgttgatatgacgggagaggtcctgtccggtggagaaacctccgaccggtttaacatctccaatggcgtgaaacagggctgcgtcctggccccagtgctgttcaacctgtttttcacacaggtgctgagacatgcggttatggatcttgacctgggtgtgtatatcaagtatcgcttggacggcagtctgttcgatctcagacgcctgacagctaagactaagactaccgagcgcctcattctcgaagccctgtttgccgacgattgtgcccttatggcccaccaggagaaccacctgcagacgattgtcgaccgcttctctacagcgaccaagctgttcggcctcaccatctccctctcaaagaccgaagtcctgtttcagcccgcacccgggagacccacgaatcagccgtgcattaccattgacgggacccaactttccaacgtcaacaccttcaagtatctgggatctaccatcgccaatgatggcagcctggatcatgaaatcaacgcaaggatccaaaaggctagccaggcactgggccgcctccggtgcaaggtcctgcagcaccggggcgtctccactgccactaaactgaaggtgtacaacgctgtcgtgctctcttccctgctttatggctgcgaaacatggactctgtaccggaagcatatgaaacagcttgagcagttccaccagaggagcttgcgtagcatcatgaggatccgctggcaggaccgcatcaccaaccaggaggtgctggacagggctaattccaccagcatcgaagttatggtgctgaagacccagctccgttggtctggccatgtcattcggatggaccctcagcgtatcccccgccaggtattctacggggaactgtctgcggggctcagaaagcagggccgcccaaagaaacgctttaaggatcagctgaaaagcaatctgaagtgggccggcatcacccccaagcagctggagctggcggcatctgaccgctccagctggcgcacccacattaaccacgcagctactacctttgaggacgaacgccggcgcagactggccgctgcacgcgagaggcgccaccaagccactaccgcccctcccgtgaccactggggtcccttgccctatgtgccacaagctgtgtgcgtctgccttcggtttgcagtcccacatgcgtgtgcatcgccgcagcggcagcgagactcccggaacctcagagtccgccacacccgaaagtgtgagcggctggcggctgttcaagaagattagctgaatggtttatattgcggccgcttaattaagctgccttctgcggggcttgccttctggccatgcccttcttctctcccttgcacctgtacctcttggtctttgaataaagcctgagtaggaagtctagaaaaaaaaaaaaaaaaaaaaaaaaaaaaaaaaaaaaaaaaaaaaaaaaaaaaaaaaaaaaaaaaaaaaaaaaaaaaaaaa

SEQ ID NO: 15020 - RNA, 3304 nt, synthetic construct; identical to SEQ ID NO: 15014
  source 1..3304: mol_type = other RNA

SEQ ID NO: 15021 - RNA, 3287 nt, synthetic construct; identical to SEQ ID NO: 15015
  source 1..3287: mol_type = other RNA

SEQ ID NO: 15022 - RNA, 3699 nt, synthetic construct
  source 1..3699: mol_type = other RNA
aggaaataagagagaaaagaagagtaagaagaaatataagagccaccatgagcggcacaccaagagtggcatttgacagcggaaaggacctcagaaatcccatagggcagtccccacctgccctcagccgggctgcccccggacagttggggacagacccctcacgttccgcatgttttatagggtgcctggagcttcgagtcctgttggacaaatggatcgtgtgccgagctcctgataagcaggaatccaaggagaaacgccgccagaaaactcagcctatacggattggaagctggaacgtcagaacaatgcggacaggcctgtctgatgacttgacagttatcgaggacatccgtaaaacagccgcaattgaccgcgaactttatcgcctgaatattgacattgttgcgctgcaagaaacgcgtttgcccgacagcggttctctcaaggaagacagctatactttcttctggcagggtaagggtatggaggaaacaagggagcacggcgtggggtttgccgtgagaaacactttgctccacatgattgagcctcccacgggtggtaccgagcgcatcattacacttcgtttaagtacccatgagggccctgtgaatctcctctgtgtttacgctcccaccctgcaggcgacatcagaggtcaaagatcaattttacgggcagttagactccgctatcaagaagatacccgtcagcgagcacatttttatcttgggagactttaacgcccgggtcgggacggaccaggagtcatggcagaccgtgctcggacatcacgggattgggaaaatgaacgaaaacgggcagcggctgctcgaactatgttgctatcacaacctgtgcgtcaccaataccttcttccagaataaagccattcataaagctagttggagacatcccagaagtcaacgatggcaccagctagacttggtaatcaccaggcggacaagcctcaattccgtttgcaataccagggcctatcattccgcggactgtgatactgatcacagcctgatcgctgcgagaatcaagctgaggcctaagaaactgcaccatatgaagaagaaaggccagccaaagatcgatgtgtctaaaactatgctccccgacaggaaccagaagttccttgaatgcctggaaggcacactcaacaacatccaaccgcaggatgcagagcacaggtgggagaccctgtccaagaccatctacagcgccgccgcacagtcctatggcaagaaggagcggaagaacacagactggttcgaggcttatatctctgagcttgagcctgtgatggatacgaagaggaaagccctggtgagttataagcagaatcccagctcacaaaatctgcaggccctgaaggctgcccgccaggaagctcagagagcctcacgacgatgcgccaacaactactggttgctactgtctgagagaattcaactagcgtccgcgaccggcgatattcgccgcatgtatgagggcatcaagcaagccaccggtaaacctatcaaaaaatctgccccccttaaggctaaatccggcgagattataaccgataaggacaagcaaatggctcgctgggtcgaacactacctggatatttattctacagagaactctgtctctcaggatgccctggataacatcgaggatttttctgtgctggccgaactcgatgctgatccaaccatagaagagttatctaaggctatagactcaatgtcaaacggcaaagcaccaggcgaagacaatattccagccgaaattataaaaagtggtaaatctgtgctccttgaaccgctgcatgaattactgagactgtgttggaaagaggggaaagtcccgcagtcaatgcgaaactcgaaaatcgtaactctgtacaagaataaaggagataggactgactgcaattcctaccgcggcataagcttgttgtctatcgtgggcaaagtattcgctaaagtggtgctaaccaggctgcaggtgctggctgatcgcgtgtacccagagagccagtgtggcttccgagccgagaggagtaccactgacatgatcttttcagtgcggcagcttcaggagaagtgccgcgagcaacaacggcctctgtacatcgcctttattgacttgactaaggcattcgacttagtgagtaggaggggacttttccagctcctgaggaagattggttgtcctccacaactgctggatataattatctcgttccatgaggatatgaagggagtcgttagtttcgatggggaaacaagcgaaccattcgcaattaggtctggcgtcaagcaaggctgcgttctggcacctacgttgtttggcatctttttctccctcctcctgaagtccgcatttgggcacagcactcagggtgtgcacctgcatacccggtctgatgggaagctttttaacctcgcccgcctcagggccaagactaaggtacgctctgtattaatcagagatatgctgttcgcagacgacgcagcgctcgttgctcatgttgaggacgagcttcaacagttattgaatcagttcgcacatgcatgctcagaattcgccctcacaattagtatcaaaaaaactgtcgtgatgggtcaggatgtgccacagcccccagtggtgacgatcggaagtgaggtcctggaggttaccgaccactttacgtaccttggaagcactgtgacctccaacctgtccctagacaaagaaatcgacaggcgcattgcccgggcagccggagtcatgacaaaactgggaacccgagtgtggaataatagtcacctcacgctgaatactaagcttgaagtgtatagatcgtgtgttctgagcacactgctttacgggtccgaaacctggaccacctacgctaagcaggagaatagactggagagctttcaccttaggtgtcttcgtcgaatcctaggcatttcctggagagatcgggttcccaacacaaccgtgttggagagaagctgctcactgagtattcacctcttactgtgccagcggcggctgcggtggctgggccacgtaagcaggatgaaggacggacgtatcccgaaagatattctcttcggggaactggctactggaaagcgtcccgtcggccgcccagctctccgcttcagggacgtatgtaaaagagatttgaaactaactgatatcgatccggcctcctgggaacagatcgcagccgaccgaaaccgttggcgccacactgtgaaggacggactggcaaaagggcaagaaagacggacagagcacttagaatcacggcggcgaaagagaaaggagaagcctcagcagggtaacccaagtgcctttatctgtcctaattgcggcagggactgccatgcgcggataggactgcaatcgcattcaagaagatgtcagccccctagcggcagcgagactcccggaacctcagagtccgccacacccgaaagtgtgagcggctggcggctgttcaagaagattagctgagctggagcctcggtggccatgcttcttgccccttgggcctccccccagcccctcctccccttcctgcacccgtacccccgtggtctttgaataaagtctgaaaaaaaaaaaaaaaaaaaaaaaaaaaaaaaaaaaaaaaaaaaaaaaaaaaaaaaaaaaaaaaaaaaaaaaaaaaaaaaaa

SEQ ID NO: 15023 - RNA, 3207 nt, synthetic construct
  source 1..3207: mol_type = other RNA
aggaaataagagagaaaagaagagtaagaagaaatataagagccaccatgccccgcaaaaattggaactgcgggcgacgaaccggggatgaaaaacgtaagatgatgtttggatgctggaatgtgcagggaatctcgacaaagatagatctgctgccagcagaactggacatgttcaacattgatgtcgtggtgctctccgagacaaagaggaagggcaagggtgaagaggagttggataattacgttcacatctggtcaggggtctctaaggctgtcagagccaaggctggtgtctccatcatgatacagaaaaagtggaagaaacgtatcactaactggacgttcataaatgagcgcatcataaccgttgaaatgacactgtttgcgcgggaagttgttatcatcggcgtatacgcccccaccaacgacactaaggataaagagaaagacgcgttttgggacactctcagagaaaccatcgaaaaaatccccagaaggaaggaacttatcataatgggtgatatgaatggccgggtggggattagagaatcctgcaagatagtgggcaagcatggagaagcagagtataacgacaatggagagcgtcttattgatatttgcgcccagttcgacttgaagatcactaacacgtttttcaagcacaaggacatccacaagtatacatggcagcaaaacacgaaagagctgagatcgatcatcgattatattattataaggcagacctctagcttcaaagctgctgacgtcagatcataccgtggagctcagtgcggtagcgaccactatctcgtaaaaatgaaaagcttttggccgtggaaaaacgccaccaatgatacaagcaacatcaataagatgaactgttccgagaaggtgcaaaacgtgcatttcaatatcgattccctgcaggacgagagcattcggacatttttcaaggcccgtatggagaggaccttggacgagagtttcgaggggtccacagaagagatctacgagtatataaagacaaaagtcaaaaacgttgcctctgaggtgctgggcatcaaggaaaataatcctaagcgagccgcagagtggtggtctgaagagattgagacatctgtgaaagagaagcgcaatgcattcgtgcagtggctgaacgataagtcagagggtactcgaagtaagtacaaggaaaaaaagaatgaagtggaaaaaaagatcagactagctaaaaatgaagcatgggaacggacctgtgccaatgtgaacagcaagctgggattcggacgcgccaaggaagcgtggtctgtcctcaaagctttacgccaggacaccaagggtaaaagtaacctgcaacttgttactcagaaggagtgggaagagtattttaagaaacttctgaatgaagatcgcgacgagtacctcgaggagggcacagtggaagagaatgaacatcacgatgatgagattctgattagcgaaagcgaagtactccaggtcctgaggacggggaaaaacggcaagtcccctggacctgggaatattaacatggagtttctcaaatacggaggggacaagatcgtaaagctcattcttcagctgttcaacaagatgctacatggcgactctgtgccaaaagagatgaagttggggtatatctccacaatttttaagaaaggcgaccgaaagatttgttcaaattacaggggtatttgtgtaactaacaccctaatgcggatcttcggaaaaattatcaagaataaactggaaaagaactttcggacgcaacaggaacagtgcggttttacagcggggcgctcttgcgtggatcacatcttcaccctgagacagatattggagaagcacagagaaaaaagtaaaaacgtgggacttattttcatagacttagagaaagcatacgacactgtgccccggaaattgttatggcgggccctacacagggcaaatatcaacacatcactgattaaaattatcgagcagatgtacaaagacaacatttgtcaggtgaagatcggcaacaccctgagccagaaatttcgaactagtaaggggctgttgcagggatgccctatgtccccaactctctttaagatctatatcgatatttgtctgcggacctggtcacaaaaatgtaattccatgggtcttgagatccgggatggcgtatatctccatcatttactattcgccgatgatcaagtggttatcgcccaggacggcgaggacgccaattacatgtgtaaccaattagccatagcttacaaaaactggggcctgaagatcaattaccaaaaaactgagtatctgacgaacgacccgcacgaactgagaatcgaggggaagaagattaaaaaggtgaacaccttctgctacttgggcagtatccttgaaaccgaagggaagtcagacagtgagattaataaaaggattagctccggccgtaaggtcatcggcatgctgaattcagttctgtggagccggaacgtcatgaatagaacaaagaaaattatttataagtctatattcgagagcgctgtcctctatggcgctgagacttggacaatcaaccagaaacataccaaaaagctgcaggcactcgagatggacttttggcgacgcagtgcacgcatctctcggaaggaaaaaagacggaacaccgaagtgattaaaaggatggagatcatagagagaattgatgaggtcatggacaggaagaagcttaggtggtacggacacgtcaggaggatggaggataccaggatccccaagttggtgctggagtggcagcctgagggacgccgccgaagagggcgcccagtgactacatggataaaaaacgttcaactgaccatgaacagactcggcgccgaagaagaggacacccaggataggcatacttggcggaatattgtgaataatagcggcagcgagactcccggaacctcagagtccgccacacccgaaagtgtgagcggctggcggctgttcaagaagattagctgagctggagcctcggtggccatgcttcttgccccttgggcctccccccagcccctcctccccttcctgcacccgtacccccgtggtctttgaataaagtctgaaaaaaaaaaaaaaaaaaaaaaaaaaaaaaaaaaaaaaaaaaaaaaaaaaaaaaaaaaaaaaaaaaaaaaaaaaaaaaaaa

SEQ ID NO: 15024 - protein, 992 aa, synthetic construct
MPRKNWNCGRRTGDEKRKMMFGCWNVQGISTKIDLLPAELDMFNIDVVVLSETKRKGKGEEELDNYVHIWSGVSKAVRAKAGVSIMIQKKWKKRITNWTFINERIITVEMTLFAREVVIIGVYAPTNDTKDKEKDAFWDTLRETIEKIPRRKELIIMGDMNGRVGIRESCKIVGKHGEAEYNDNGERLIDICAQFDLKITNTFFKHKDIHKYTWQQNTKELRSIIDYIIIRQTSSFKAADVRSYRGAQCGSDHYLVKMKSFWPWKNATNDTSNINKMNCSEKVQNVHFNIDSLQDESIRTFFKARMERTLDESFEGSTEEIYEYIKTKVKNVASEVLGIKENNPKRAAEWWSEEIETSVKEKRNAFVQWLNDKSEGTRSKYKEKKNEVEKKIRLAKNEAWERTCANVNSKLGFGRAKEAWSVLKALRQDTKGKSNLQLVTQKEWEEYFKKLLNEDRDEYLEEGTVEENEHHDDEILISESEVLQVLRTGKNGKSPGPGNINMEFLKYGGDKIVKLILQLFNKMLHGDSVPKEMKLGYISTIFKKGDRKICSNYRGICVTNTLMRIFGKIIKNKLEKNFRTQQEQCGFTAGRSCVDHIFTLRQILEKHREKSKNVGLIFIDLEKAYDTVPRKLLWRALHRANINTSLIKIIEQMYKDNICQVKIGNTLSQKFRTSKGLLQGCPMSPTLFKIYIDICLRTWSQKCNSMGLEIRDGVYLHHLLFADDQVVIAQDGEDANYMCNQLAIAYKNWGLKINYQKTEYLTNDPHELRIEGKKIKKVNTFCYLGSILETEGKSDSEINKRISSGRKVIGMLNSVLWSRNVMNRTKKIIYKSIFESAVLYGAETWTINQKHTKKLQALEMDFWRRSARISRKEKRRNTEVIKRMEIIERIDEVMDRKKLRWYGHVRRMEDTRIPKLVLEWQPEGRRRRGRPVTTWIKNVQLTMNRLGAEEEDTQDRHTWRNIVNNSGSETPGTSESATPESVSGWRLFKKIS

SEQ ID NO: 15025-15400 - skipped (376 entries)

SEQ ID NO: 15401 - protein, 46 aa, synthetic construct; identical to SEQ ID NO: 217

SEQ ID NO: 15402 - protein, 46 aa, synthetic construct; identical to SEQ ID NO: 217

SEQ ID NO: 15403 - protein, 46 aa, synthetic construct; identical to SEQ ID NO: 217

SEQ ID NO: 15404 - protein, 46 aa, synthetic construct; identical to SEQ ID NO: 217

SEQ ID NO: 15405 - DNA, 22 bp, Danio rerio
  source 1..22: mol_type = genomic DNA
tgagcacggtagcattagtcga

SEQ ID NO: 15406 - DNA, 200 bp, synthetic construct
  source 1..200: mol_type = other DNA
  misc_difference 1: note = a, c, t, g, unknown or other
  misc_difference 2: note = a, c, t, g, unknown or other
  misc_difference 3: note = a, c, t, g, unknown or other
  misc_difference 4: note = a, c, t, g, unknown or other
  misc_difference 5: note = a, c, t, g, unknown or other
  misc_difference 6: note = a, c, t, g, unknown or other
  misc_difference 7: note = a, c, t, g, unknown or other
  misc_difference 8: note = a, c, t, g, unknown or other
  misc_difference 9: note = a, c, t, g, unknown or other
  misc_difference 10: note = a, c, t, g, unknown or other
  misc_difference 11: note = a, c, t, g, unknown or other
  misc_difference 12: note = a, c, t, g, unknown or other
  misc_difference 13: note = a, c, t, g, unknown or other
  misc_difference 14: note = a, c, t, g, unknown or other
  misc_difference 15: note = a, c, t, g, unknown or other
  misc_difference 16: note = a, c, t, g, unknown or other
  misc_difference 17: note = a, c, t, g, unknown or other
  misc_difference 18: note = a, c, t, g, unknown or other
  misc_difference 19: note = a, c, t, g, unknown or other
  misc_difference 21: note = a, c, t, g, unknown or other
  misc_difference 22: note = a, c, t, g, unknown or other
  misc_difference 23: note = a, c, t, g, unknown or other
  misc_difference 24: note = a, c, t, g, unknown or other
  misc_difference 25: note = a, c, t, g, unknown or other
  misc_difference 27: note = a, c, t, g, unknown or other
  misc_difference 28: note = a, c, t, g, unknown or other
  misc_difference 31: note = a, c, t, g, unknown or other
  misc_difference 32: note = a, c, t, g, unknown or other
  misc_difference 33: note = a, c, t, g, unknown or other
  misc_difference 34: note = a, c, t, g, unknown or other
  misc_difference 36: note = a, c, t, g, unknown or other
  misc_difference 37: note = a, c, t, g, unknown or other
  misc_difference 38: note = a, c, t, g, unknown or other
  misc_difference 39: note = a, c, t, g, unknown or other
  misc_difference 40: note = a, c, t, g, unknown or other
  misc_difference 41: note = a, c, t, g, unknown or other
  misc_difference 42: note = a, c, t, g, unknown or other
  misc_difference 43: note = a, c, t, g, unknown or other
  misc_difference 44: note = a, c, t, g, unknown or other
  misc_difference 45: note = a, c, t, g, unknown or other
  misc_difference 46: note = a, c, t, g, unknown or other
  misc_difference 47: note = a, c, t, g, unknown or other
  misc_difference 48: note = a, c, t, g, unknown or other
  misc_difference 49: note = a, c, t, g, unknown or other
  misc_difference 51: note = a, c, t, g, unknown or other
  misc_difference 52: note = a, c, t, g, unknown or other
  misc_difference 53: note = a, c, t, g, unknown or other
  misc_difference 54: note = a, c, t, g, unknown or other
  misc_difference 55: note = a, c, t, g, unknown or other
  misc_difference 56: note = a, c, t, g, unknown or other
  misc_difference 57: note = a, c, t, g, unknown or other
  misc_difference 58: note = a, c, t, g, unknown or other
  misc_difference 59: note = a, c, t, g, unknown or other
  misc_difference 60: note = a, c, t, g, unknown or other
  misc_difference 61: note = a, c, t, g, unknown or other
  misc_difference 62: note = a, c, t, g, unknown or other
  misc_difference 63: note = a, c, t, g, unknown or other
  misc_difference 64: note = a, c, t, g, unknown or other
  misc_difference 65: note = a, c, t, g, unknown or other
  misc_difference 66: note = a, c, t, g, unknown or other
  misc_difference 68: note = a, c, t, g, unknown or other
  misc_difference 69: note = a, c, t, g, unknown or other
  misc_difference 70: note = a, c, t, g, unknown or other
  misc_difference 71: note = a, c, t, g, unknown or other
  misc_difference 72: note = a, c, t, g, unknown or other
  misc_difference 73: note = a, c, t, g, unknown or other
  misc_difference 74: note = a, c, t, g, unknown or other
  misc_difference 75: note = a, c, t, g, unknown or other
  misc_difference 76: note = a, c, t, g, unknown or other
  misc_difference 77: note = a, c, t, g, unknown or other
  misc_difference 78: note = a, c, t, g, unknown or other
  misc_difference 79: note = a, c, t, g, unknown or other
  misc_difference 80: note = a, c, t, g, unknown or other
  misc_difference 81: note = a, c, t, g, unknown or other
  misc_difference 82: note = a, c, t, g, unknown or other
  misc_difference 83: note = a, c, t, g, unknown or other
  misc_difference 84: note = a, c, t, g, unknown or other
  misc_difference 85: note = a, c, t, g, unknown or other
  misc_difference 86: note = a, c, t, g, unknown or other
  misc_difference 87: note = a, c, t, g, unknown or other
  misc_difference 89: note = a, c, t, g, unknown or other
  misc_difference 90: note = a, c, t, g, unknown or other
  misc_difference 91: note = a, c, t, g, unknown or other
  misc_difference 92: note = a, c, t, g, unknown or other
  misc_difference 93: note = a, c, t, g, unknown or other
  misc_difference 94: note = a, c, t, g, unknown or other
  misc_difference 95: note = a, c, t, g, unknown or other
  misc_difference 96: note = a, c, t, g, unknown or other
  misc_difference 97: note = a, c, t, g, unknown or other
  misc_difference 98: note = a, c, t, g, unknown or other
  misc_difference 99: note = a, c, t, g, unknown or other
  misc_difference 100: note = a, c, t, g, unknown or other
  misc_difference 101: note = a, c, t, g, unknown or other
  misc_difference 102: note = a, c, t, g, unknown or other
  misc_difference 104: note = a, c, t, g, unknown or other
  misc_difference 105: note = a, c, t, g, unknown or other
  misc_difference 106: note = a, c, t, g, unknown or other
  misc_difference 107: note = a, c, t, g, unknown or other
  misc_difference 108: note = a, c, t, g, unknown or other
  misc_difference 109: note = a, c, t, g, unknown or other
  misc_difference 110: note = a, c, t, g, unknown or other
  misc_difference 111: note = a, c, t, g, unknown or other
  misc_difference 112: note = a, c, t, g, unknown or other
  misc_difference 113: note = a, c, t, g, unknown or other
  misc_difference 114: note = a, c, t, g, unknown or other
  misc_difference 115: note = a, c, t, g, unknown or other
  misc_difference 116: note = a, c, t, g, unknown or other
  misc_difference 117: note = a, c, t, g, unknown or other
  misc_difference 118: note = a, c, t, g, unknown or other
  misc_difference 119: note = a, c, t, g, unknown or other
  misc_difference 120: note = a, c, t, g, unknown or other
  misc_difference 121: note = a, c, t, g, unknown or other
  misc_difference 122: note = a, c, t, g, unknown or other
  misc_difference 123: note = a, c, t, g, unknown or other
  misc_difference 125: note = a, c, t, g, unknown or other
  misc_difference 126: note = a, c, t, g, unknown or other
  misc_difference 127: note = a, c, t, g, unknown or other
  misc_difference 128: note = a, c, t, g, unknown or other
  misc_difference 129: note = a, c, t, g, unknown or other
  misc_difference 130: note = a, c, t, g, unknown or other
  misc_difference 131: note = a, c, t, g, unknown or other
  misc_difference 132: note = a, c, t, g, unknown or other
  misc_difference 133: note = a, c, t, g, unknown or other
  misc_difference 134: note = a, c, t, g, unknown or other
  misc_difference 135: note = a, c, t, g, unknown or other
  misc_difference 136: note = a, c, t, g, unknown or other
  misc_difference 137: note = a, c, t, g, unknown or other
  misc_difference 138: note = a, c, t, g, unknown or other
  misc_difference 139: note = a, c, t, g, unknown or other
  misc_difference 140: note = a, c, t, g, unknown or other
  misc_difference 141: note = a, c, t, g, unknown or other
  misc_difference 142: note = a, c, t, g, unknown or other
  misc_difference 145: note = a, c, t, g, unknown or other
  misc_difference 146: note = a, c, t, g, unknown or other
  misc_difference 147: note = a, c, t, g, unknown or other
  misc_difference 148: note = a, c, t, g, unknown or other
  misc_difference 149: note = a, c, t, g, unknown or other
  misc_difference 150: note = a, c, t, g, unknown or other
  misc_difference 151: note = a, c, t, g, unknown or other
  misc_difference 152: note = a, c, t, g, unknown or other
  misc_difference 154: note = a, c, t, g, unknown or other
  misc_difference 155: note = a, c, t, g, unknown or other
  misc_difference 156: note = a, c, t, g, unknown or other
  misc_difference 157: note = a, c, t, g, unknown or other
  misc_difference 158: note = a, c, t, g, unknown or other
  misc_difference 159: note = a, c, t, g, unknown or other
  misc_difference 160: note = a, c, t, g, unknown or other
  misc_difference 161: note = a, c, t, g, unknown or other
  misc_difference 162: note = a, c, t, g, unknown or other
  misc_difference 163: note = a, c, t, g, unknown or other
  misc_difference 164: note = a, c, t, g, unknown or other
  misc_difference 165: note = a, c, t, g, unknown or other
  misc_difference 166: note = a, c, t, g, unknown or other
  misc_difference 167: note = a, c, t, g, unknown or other
  misc_difference 168: note = a, c, t, g, unknown or other
  misc_difference 169: note = a, c, t, g, unknown or other
  misc_difference 170: note = a, c, t, g, unknown or other
  misc_difference 171: note = a, c, t, g, unknown or other
  misc_difference 172: note = a, c, t, g, unknown or other
  misc_difference 173: note = a, c, t, g, unknown or other
  misc_difference 174: note = a, c, t, g, unknown or other
  misc_difference 175: note = a, c, t, g, unknown or other
  misc_difference 176: note = a, c, t, g, unknown or other
  misc_difference 177: note = a, c, t, g, unknown or other
  misc_difference 178: note = a, c, t, g, unknown or other
  misc_difference 180: note = a, c, t, g, unknown or other
  misc_difference 181: note = a, c, t, g, unknown or other
  misc_difference 182: note = a, c, t, g, unknown or other
  misc_difference 183: note = a, c, t, g, unknown or other
  misc_difference 184: note = a, c, t, g, unknown or other
  misc_difference 185: note = a, c, t, g, unknown or other
  misc_difference 186: note = a, c, t, g, unknown or other
  misc_difference 187: note = a, c, t, g, unknown or other
  misc_difference 188: note = a, c, t, g, unknown or other
  misc_difference 189: note = a, c, t, g, unknown or other
  misc_difference 190: note = a, c, t, g, unknown or other
  misc_difference 192: note = a, c, t, g, unknown or other
  misc_difference 193: note = a, c, t, g, unknown or other
  misc_difference 194: note = a, c, t, g, unknown or other
  misc_difference 195: note = a, c, t, g, unknown or other
  misc_difference 196: note = a, c, t, g, unknown or other
  misc_difference 197: note = a, c, t, g, unknown or other
  misc_difference 198: note = a, c, t, g, unknown or other
  misc_difference 199: note = a, c, t, g, unknown or other
  misc_difference 200: note = a, c, t, g, unknown or other
nnnnnnnnnnnnnnnnnnntnnnnncnngtnnnnannnnnnnnnnnnnncnnnnnnnnnnnnnnnntnnnnnnnnnnnnnnnnnnnntnnnnnnnnnnnnnntnnnnnnnnnnnnnnnnnnnncnnnnnnnnnnnnnnnnnngcnnnnnnnntnnnnnnnnnnnnnnnnnnnnnnnnntnnnnnnnnnnnannnnnnnnn

SEQ ID NO: 15407 - DNA, 200 bp, synthetic construct
  source 1..200: mol_type = other DNA
  misc_difference 1: note = a, c, t, g, unknown or other
  misc_difference 3: note = a, c, t, g, unknown or other
  misc_difference 4: note = a, c, t, g, unknown or other
  misc_difference 5: note = a, c, t, g, unknown or other
  misc_difference 6: note = a, c, t, g, unknown or other
  misc_difference 7: note = a, c, t, g, unknown or other
  misc_difference 8: note = a, c, t, g, unknown or other
  misc_difference 9: note = a, c, t, g, unknown or other
  misc_difference 10: note = a, c, t, g, unknown or other
  misc_difference 11: note = a, c, t, g, unknown or other
  misc_difference 12: note = a, c, t, g, unknown or other
  misc_difference 13: note = a, c, t, g, unknown or other
  misc_difference 15: note = a, c, t, g, unknown or other
  misc_difference 16: note = a, c, t, g, unknown or other
  misc_difference 17: note = a, c, t, g, unknown or other
  misc_difference 18: note = a, c, t, g, unknown or other
  misc_difference 19: note = a, c, t, g, unknown or other
  misc_difference 20: note = a, c, t, g, unknown or other
  misc_difference 21: note = a, c, t, g, unknown or other
  misc_difference 22: note = a, c, t, g, unknown or other
  misc_difference 23: note = a, c, t, g, unknown or other
  misc_difference 24: note = a, c, t, g, unknown or other
  misc_difference 25: note = a, c, t, g, unknown or other
  misc_difference 26: note = a, c, t, g, unknown or other
  misc_difference 27: note = a, c, t, g, unknown or other
  misc_difference 28: note = a, c, t, g, unknown or other
  misc_difference 29: note = a, c, t, g, unknown or other
  misc_difference 30: note = a, c, t, g, unknown or other
  misc_difference 31: note = a, c, t, g, unknown or other
  misc_difference 32: note = a, c, t, g, unknown or other
  misc_difference 33: note = a, c, t, g, unknown or other
  misc_difference 34: note = a, c, t, g, unknown or other
  misc_difference 35: note = a, c, t, g, unknown or other
  misc_difference 37: note = a, c, t, g, unknown or other
  misc_difference 38: note = a, c, t, g, unknown or other
  misc_difference 39: note = a, c, t, g, unknown or other
  misc_difference 40: note = a, c, t, g, unknown or other
  misc_difference 41: note = a, c, t, g, unknown or other
  misc_difference 42: note = a, c, t, g, unknown or other
  misc_difference 43: note = a, c, t, g, unknown or other
  misc_difference 44: note = a, c, t, g, unknown or other
  misc_difference 45: note = a, c, t, g, unknown or other
  misc_difference 46: note = a, c, t, g, unknown or other
  misc_difference 47: note = a, c, t, g, unknown or other
  misc_difference 48: note = a, c, t, g, unknown or other
  misc_difference 49: note = a, c, t, g, unknown or other
  misc_difference 50: note = a, c, t, g, unknown or other
  misc_difference 51: note = a, c, t, g, unknown or other
  misc_difference 52: note = a, c, t, g, unknown or other
  misc_difference 53: note = a, c, t, g, unknown or other
  misc_difference 54: note = a, c, t, g, unknown or other
  misc_difference 55: note = a, c, t, g, unknown or other
  misc_difference 56: note = a, c, t, g, unknown or other
  misc_difference 57: note = a, c, t, g, unknown or other
  misc_difference 58: note = a, c, t, g, unknown or other
  misc_difference 59: note = a, c, t, g, unknown or other
  misc_difference 60: note = a, c, t, g, unknown or other
  misc_difference 61: note = a, c, t, g, unknown or other
  misc_difference 62: note = a, c, t, g, unknown or other
  misc_difference 63: note = a, c, t, g, unknown or other
  misc_difference 64: note = a, c, t, g, unknown or other
  misc_difference 65: note = a, c, t, g, unknown or other
  misc_difference 66: note = a, c, t, g, unknown or other
  misc_difference 67: note = a, c, t, g, unknown or other
  misc_difference 68: note = a, c, t, g, unknown or other
  misc_difference 69: note = a, c, t, g, unknown or other
  misc_difference 70: note = a, c, t, g, unknown or other
  misc_difference 71: note = a, c, t, g, unknown or other
  misc_difference 72: note = a, c, t, g, unknown or other
  misc_difference 74: note = a, c, t, g, unknown or other
  misc_difference 75: note = a, c, t, g, unknown or other
  misc_difference 76: note = a, c, t, g, unknown or other
  misc_difference 78: note = a, c, t, g, unknown or other
  misc_difference 79: note = a, c, t, g, unknown or other
  misc_difference 80: note = a, c, t, g, unknown or other
  misc_difference 81: note = a, c, t, g, unknown or other
  misc_difference 82: note = a, c, t, g, unknown or other
  misc_difference 83: note = a, c, t, g, unknown or other
  misc_difference 84: note = a, c, t, g, unknown or other
  misc_difference 85: note = a, c, t, g, unknown or other
  misc_difference 86: note = a, c, t, g, unknown or other
  misc_difference 87: note = a, c, t, g, unknown or other
  misc_difference 88: note = a, c, t, g, unknown or other
  misc_difference 89: note = a, c, t, g, unknown or other
  misc_difference 91: note = a, c, t, g, unknown or other
  misc_difference 92: note = a, c, t, g, unknown or other
  misc_difference 93: note = a, c, t, g, unknown or other
  misc_difference 94: note = a, c, t, g, unknown or other
  misc_difference 95: note = a, c, t, g, unknown or other
  misc_difference 96: note = a, c, t, g, unknown or other
  misc_difference 97: note = a, c, t, g, unknown or other
  misc_difference 98: note = a, c, t, g, unknown or other
  misc_difference 99: note = a, c, t, g, unknown or other
  misc_difference 100: note = a, c, t, g, unknown or other
  misc_difference 101: note = a, c, t, g, unknown or other
  misc_difference 102: note = a, c, t, g, unknown or other
  misc_difference 103: note = a, c, t, g, unknown or other
  misc_difference 104: note = a, c, t, g, unknown or other
  misc_difference 105: note = a, c, t, g, unknown or other
  misc_difference 106: note = a, c, t, g, unknown or other
  misc_difference 107: note = a, c, t, g, unknown or other
  misc_difference 108: note = a, c, t, g, unknown or other
  misc_difference 109: note = a, c, t, g, unknown or other
  misc_difference 110: note = a, c, t, g, unknown or other
  misc_difference 111: note = a, c, t, g, unknown or other
  misc_difference 112: note = a, c, t, g, unknown or other
  misc_difference 114: note = a, c, t, g, unknown or other
  misc_difference 115: note = a, c, t, g, unknown or other
  misc_difference 116: note = a, c, t, g, unknown or other
  misc_difference 117: note = a, c, t, g, unknown or other
  misc_difference 118: note = a, c, t, g, unknown or other
  misc_difference 119: note = a, c, t, g, unknown or other
  misc_difference 120: note = a, c, t, g, unknown or other
  misc_difference 121: note = a, c, t, g, unknown or other
  misc_difference 122: note = a, c, t, g, unknown or other
  misc_difference 123: note = a, c, t, g, unknown or other
  misc_difference 124: note = a, c, t, g, unknown or other
  misc_difference 125: note = a, c, t, g, unknown or other
  misc_difference 126: note = a, c, t, g, unknown or other
  misc_difference 127: note = a, c, t, g, unknown or other
  misc_difference 129: note = a, c, t, g, unknown or other
  misc_difference 131: note = a, c, t, g, unknown or other
  misc_difference 132: note = a, c, t, g, unknown or other
  misc_difference 133: note = a, c, t, g, unknown or other
  misc_difference 134: note = a, c, t, g, unknown or other
  misc_difference 135: note = a, c, t, g, unknown or other
  misc_difference 136: note = a, c, t, g, unknown or other
  misc_difference 138: note = a, c, t, g, unknown or other
  misc_difference 139: note = a, c, t, g, unknown or other
  misc_difference 140: note = a, c, t, g, unknown or other
  misc_difference 141: note = a, c, t, g, unknown or other
  misc_difference 142: note = a, c, t, g, unknown or other
  misc_difference 144: note = a, c, t, g, unknown or other
  misc_difference 145: note = a, c, t, g, unknown or other
  misc_difference 146: note = a, c, t, g, unknown or other
  misc_difference 147: note = a, c, t, g, unknown or other
  misc_difference 148: note = a, c, t, g, unknown or other
  misc_difference 149: note = a, c, t, g, unknown or other
  misc_difference 150: note = a, c, t, g, unknown or other
  misc_difference 151: note = a, c, t, g, unknown or other
  misc_difference 153: note = a, c, t, g, unknown or other
  misc_difference 154: note = a, c, t, g, unknown or other
  misc_difference 155: note = a, c, t, g, unknown or other
  misc_difference 156: note = a, c, t, g, unknown or other
  misc_difference 157: note = a, c, t, g, unknown or other
  misc_difference 158: note = a, c, t, g, unknown or other
  misc_difference 159: note = a, c, t, g, unknown or other
  misc_difference 160: note = a, c, t, g, unknown or other
  misc_difference 161: note = a, c, t, g, unknown or other
  misc_difference 162: note = a, c, t, g, unknown or other
  misc_difference 163: note = a, c, t, g, unknown or other
  misc_difference 164: note = a, c, t, g, unknown or other
  misc_difference 165: note = a, c, t, g, unknown or other
  misc_difference 166: note = a, c, t, g, unknown or other
  misc_difference 168: note = a, c, t, g, unknown or other
  misc_difference 169: note = a, c, t, g, unknown or other
  misc_difference 170: note = a, c, t, g, unknown or other
  misc_difference 171: note = a, c, t, g, unknown or other
  misc_difference 172: note = a, c, t, g, unknown or other
  misc_difference 173: note = a, c, t, g, unknown or other
  misc_difference 174: note = a, c, t, g, unknown or other
  misc_difference 175: note = a, c, t, g, unknown or other
  misc_difference 176: note = a, c, t, g, unknown or other
  misc_difference 177: note = a, c, t, g, unknown or other
  misc_difference 178: note = a, c, t, g, unknown or other
  misc_difference 179: note = a, c, t, g, unknown or other
  misc_difference 180: note = a, c, t, g, unknown or other
  misc_difference 182: note = a, c, t, g, unknown or other
  misc_difference 183: note = a, c, t, g, unknown or other
  misc_difference 184: note = a, c, t, g, unknown or other
  misc_difference 185: note = a, c, t, g, unknown or other
  misc_difference 186: note = a, c, t, g, unknown or other
  misc_difference 187: note = a, c, t, g, unknown or other
  misc_difference 188: note = a, c, t, g, unknown or other
  misc_difference 189: note = a, c, t, g, unknown or other
  misc_difference 190: note = a, c, t, g, unknown or other
  misc_difference 191: note = a, c, t, g, unknown or other
  misc_difference 192: note = a, c, t, g, unknown or other
  misc_difference 193: note = a, c, t, g, unknown or other
  misc_difference 194: note = a, c, t, g, unknown or other
  misc_difference 195: note = a, c, t, g, unknown or other
  misc_difference 196: note = a, c, t, g, unknown or other
  misc_difference 197: note = a, c, t, g, unknown or other
  misc_difference 198: note = a, c, t, g, unknown or other
  misc_difference 199: note = a, c, t, g, unknown or other
  misc_difference 200: note = a, c, t, g, unknown or other
ntnnnnnnnnnnntnnnnnnnnnnnnnnnnnnnnngnnnnnnnnnnnnnnnnnnnnnnnnnnnnnnnnnnnntnnntnnnnnnnnnnnnannnnnnnnnnnnnnnnnnnnnntnnnnnnnnnnnnnngngnnnnnntnnnnncnnnnnnnntnnnnnnnnnnnnnntnnnnnnnnnnnnnannnnnnnnnnnnnnnnnnn

SEQ ID NO: 15408 - DNA, 200 bp, synthetic construct
  source 1..200: mol_type = other DNA
  misc_difference 1: note = a, c, t, g, unknown or other
  misc_difference 2: note = a, c, t, g, unknown or other
  misc_difference 3: note = a, c, t, g, unknown or other
  misc_difference 4: note = a, c, t, g, unknown or other
  misc_difference 5: note = a, c, t, g, unknown or other
  misc_difference 6: note = a, c, t, g, unknown or other
  misc_difference 7: note = a, c, t, g, unknown or other
  misc_difference 8: note = a, c, t, g, unknown or other
  misc_difference 9: note = a, c, t, g, unknown or other
  misc_difference 10: note = a, c, t, g, unknown or other
  misc_difference 11: note = a, c, t, g, unknown or other
  misc_difference 12: note = a, c, t, g, unknown or other
  misc_difference 13: note = a, c, t, g, unknown or other
  misc_difference 14: note = a, c, t, g, unknown or other
  misc_difference 15: note = a, c, t, g, unknown or other
  misc_difference 16: note = a, c, t, g, unknown or other
  misc_difference 17: note = a, c, t, g, unknown or other
  misc_difference 18: note = a, c, t, g, unknown or other
  misc_difference 19: note = a, c, t, g, unknown or other
  misc_difference 20: note = a, c, t, g, unknown or other
  misc_difference 21: note = a, c, t, g, unknown or other
  misc_difference 22: note = a, c, t, g, unknown or other
  misc_difference 24: note = a, c, t, g, unknown or other
  misc_difference 25: note = a, c, t, g, unknown or other
  misc_difference 26: note = a, c, t, g, unknown or other
  misc_difference 27: note = a, c, t, g, unknown or other
  misc_difference 28: note = a, c, t, g, unknown or other
  misc_difference 29: note = a, c, t, g, unknown or other
  misc_difference 30: note = a, c, t, g, unknown or other
  misc_difference 31: note = a, c, t, g, unknown or other
  misc_difference 32: note = a, c, t, g, unknown or other
  misc_difference 33: note = a, c, t, g, unknown or other
  misc_difference 34: note = a, c, t, g, unknown or other
  misc_difference 35: note = a, c, t, g, unknown or other
  misc_difference 36: note = a, c, t, g, unknown or other
  misc_difference 37: note = a, c, t, g, unknown or other
  misc_difference 38: note = a, c, t, g, unknown or other
  misc_difference 39: note = a, c, t, g, unknown or other
  misc_difference 41: note = a, c, t, g, unknown or other
  misc_difference 42: note = a, c, t, g, unknown or other
  misc_difference 43: note = a, c, t, g, unknown or other
  misc_difference 44: note = a, c, t, g, unknown or other
  misc_difference 45: note = a, c, t, g, unknown or other
  misc_difference 47: note = a, c, t, g, unknown or other
  misc_difference 48: note = a, c, t, g, unknown or other
  misc_difference 49: note = a, c, t, g, unknown or other
  misc_difference 51: note = a, c, t, g, unknown or other
  misc_difference 52: note = a, c, t, g, unknown or other
  misc_difference 53: note = a, c, t, g, unknown or other
  misc_difference 54: note = a, c, t, g, unknown or other
  misc_difference 55: note = a, c, t, g, unknown or other
  misc_difference 56: note = a, c, t, g, unknown or other
  misc_difference 57: note = a, c, t, g, unknown or other
  misc_difference 58: note = a, c, t, g, unknown or other
  misc_difference 59: note = a, c, t, g, unknown or other
  misc_difference 60: note = a, c, t, g, unknown or other
  misc_difference 61: note = a, c, t, g, unknown or other
  misc_difference 62: note = a, c, t, g, unknown or other
  misc_difference 63: note = a, c, t, g, unknown or other
  misc_difference 64: note = a, c, t, g, unknown or other
  misc_difference 65: note = a, c, t, g, unknown or other
  misc_difference 66: note = a, c, t, g, unknown or other
  misc_difference 67: note = a, c, t, g, unknown or other
  misc_difference 68: note = a, c, t, g, unknown or other
  misc_difference 69: note = a, c, t, g, unknown or other
  misc_difference 70: note = a, c, t, g, unknown or other
  misc_difference 71: note = a, c, t, g, unknown or other
  misc_difference 72: note = a, c, t, g, unknown or other
  misc_difference 73: note = a, c, t, g, unknown or other
  misc_difference 74: note = a, c, t, g, unknown or other
  misc_difference 75: note = a, c, t, g, unknown or other
  misc_difference 76: note = a, c, t, g, unknown or other
  misc_difference 77: note = a, c, t, g, unknown or other
  misc_difference 78: note = a, c, t, g, unknown or other
  misc_difference 79: note = a, c, t, g, unknown or other
  misc_difference 80: note = a, c, t, g, unknown or other
  misc_difference 81: note = a, c, t, g, unknown or other
  misc_difference 82: note = a, c, t, g, unknown or other
  misc_difference 83: note = a, c, t, g, unknown or other
  misc_difference 84: note = a, c, t, g, unknown or other
  misc_difference 85: note = a, c, t, g, unknown or other
  misc_difference 86: note = a, c, t, g, unknown or other
  misc_difference 87: note = a, c, t, g, unknown or other
  misc_difference 88: note = a, c, t, g, unknown or other
  misc_difference 89: note = a, c, t, g, unknown or other
  misc_difference 90: note = a, c, t, g, unknown or other
  misc_difference 91: note = a, c, t, g, unknown or other
  misc_difference 92: note = a, c, t, g, unknown or other
  misc_difference 93: note = a, c, t, g, unknown or other
  misc_difference 94: note = a, c, t, g, unknown or other
  misc_difference 95: note = a, c, t, g, unknown or other
  misc_difference 96: note = a, c, t, g, unknown or other
  misc_difference 98: note = a, c, t, g, unknown or other
  misc_difference 99: note = a, c, t, g, unknown or other
  misc_difference 100: note = a, c, t, g, unknown or other
  misc_difference 101: note = a, c, t, g, unknown or other
  misc_difference 102: note = a, c, t, g, unknown or other
  misc_difference 103: note = a, c, t, g, unknown or other
  misc_difference 104: note = a, c, t, g, unknown or other
  misc_difference 105: note = a, c, t, g, unknown or other
  misc_difference 106: note = a, c, t, g, unknown or other
  misc_difference 107: note = a, c, t, g, unknown or other
  misc_difference 108: note = a, c, t, g, unknown or other
  misc_difference 109: note = a, c, t, g, unknown or other
  misc_difference 110: note = a, c, t, g, unknown or other
  misc_difference 111: note = a, c, t, g, unknown or other
  misc_difference 113: note = a, c, t, g, unknown or other
  misc_difference 114: note = a, c, t, g, unknown or other
  misc_difference 115: note = a, c, t, g, unknown or other
  misc_difference 116: note = a, c, t, g, unknown or other
  misc_difference 117: note = a, c, t, g, unknown or other
  misc_difference 118: note = a, c, t, g, unknown or other
  misc_difference 119: note = a, c, t, g, unknown or other
  misc_difference 120: note = a, c, t, g, unknown or other
  misc_difference 121: note = a, c, t, g, unknown or other
  misc_difference 122: note = a, c, t, g, unknown or other
  misc_difference 123: note = a, c, t, g, unknown or other
  misc_difference 124: note = a, c, t, g, unknown or other
  misc_difference 125: note = a, c, t, g, unknown or other
  misc_difference 127: note = a, c, t, g, unknown or other
  misc_difference 129: note = a, c, t, g, unknown or other
  misc_difference 130: note = a, c, t, g, unknown or other
  misc_difference 132: note = a, c, t, g, unknown or other
  misc_difference 133: note = a, c, t, g, unknown or other
  misc_difference 134: note = a, c, t, g, unknown or other
  misc_difference 135: note = a, c, t, g, unknown or other
  misc_difference 136: note = a, c, t, g, unknown or other
  misc_difference 137: note = a, c, t, g, unknown or other
  misc_difference 138: note = a, c, t, g, unknown or other
  misc_difference 139: note = a, c, t, g, unknown or other
  misc_difference 140: note = a, c, t, g, unknown or other
  misc_difference 141: note = a, c, t, g, unknown or other
  misc_difference 142: note = a, c, t, g, unknown or other
  misc_difference 143: note = a, c, t, g, unknown or other
  misc_difference 144: note = a, c, t, g, unknown or other
  misc_difference 145: note = a, c, t, g, unknown or other
  misc_difference 146: note = a, c, t, g, unknown or other
  misc_difference 147: note = a, c, t, g, unknown or other
  misc_difference 149: note = a, c, t, g, unknown or other
  misc_difference 150: note = a, c, t, g, unknown or other
  misc_difference 151: note = a, c, t, g, unknown or other
  misc_difference 152: note = a, c, t, g, unknown or other
  misc_difference 153: note = a, c, t, g, unknown or other
  misc_difference 154: note = a, c, t, g, unknown or other
  misc_difference 155: note = a, c, t, g, unknown or other
  misc_difference 156: note = a, c, t, g, unknown or other
  misc_difference 157: note = a, c, t, g, unknown or other
  misc_difference 158: note = a, c, t, g, unknown or other
  misc_difference 159: note = a, c, t, g, unknown or other
  misc_difference 160: note = a, c, t, g, unknown or other
  misc_difference 161: note = a, c, t, g, unknown or other
  misc_difference 163: note = a, c, t, g, unknown or other
  misc_difference 164: note = a, c, t, g, unknown or other
  misc_difference 165: note = a, c, t, g, unknown or other
  misc_difference 166: note = a, c, t, g, unknown or other
  misc_difference 167: note = a, c, t, g, unknown or other
  misc_difference 168: note = a, c, t, g, unknown or other
  misc_difference 170: note = a, c, t, g, unknown or other
  misc_difference 171: note = a, c, t, g, unknown or other
  misc_difference 172: note = a, c, t, g, unknown or other
  misc_difference 173: note = a, c, t, g, unknown or other
  misc_difference 174: note = a, c, t, g, unknown or other
  misc_difference 176: note = a, c, t, g, unknown or other
  misc_difference 177: note = a, c, t, g, unknown or other
  misc_difference 178: note = a, c, t, g, unknown or other
  misc_difference 179: note = a, c, t, g, unknown or other
  misc_difference 180: note = a, c, t, g, unknown or other
  misc_difference 181: note = a, c, t, g, unknown or other
  misc_difference 183: note = a, c, t, g, unknown or other
  misc_difference 184: note = a, c, t, g, unknown or other
  misc_difference 185: note = a, c, t, g, unknown or other
  misc_difference 186: note = a, c, t, g, unknown or other
  misc_difference 187: note = a, c, t, g, unknown or other
  misc_difference 188: note = a, c, t, g, unknown or other
  misc_difference 189: note = a, c, t, g, unknown or other
  misc_difference 190: note = a, c, t, g, unknown or other
  misc_difference 191: note = a, c, t, g, unknown or other
  misc_difference 192: note = a, c, t, g, unknown or other
  misc_difference 193: note = a, c, t, g, unknown or other
  misc_difference 195: note = a, c, t, g, unknown or other
  misc_difference 196: note = a, c, t, g, unknown or other
  misc_difference 197: note = a, c, t, g, unknown or other
  misc_difference 198: note = a, c, t, g, unknown or other
  misc_difference 199: note = a, c, t, g, unknown or other
  misc_difference 200: note = a, c, t, g, unknown or other
nnnnnnnnnnnnnnnnnnnnnnannnnnnnnnnnnnnnnannnnncnnnannnnnnnnnnnnnnnnnnnnnnnnnnnnnnnnnnnnnnnnnnnnnncnnnnnnnnnnnnnnannnnnnnnnnnnnantnntnnnnnnnnnnnnnnnnannnnnnnnnnnnngnnnnnnannnnntnnnnnnannnnnnnnnnnannnnnn

SEQ ID NO: 15409 - protein, 4 aa, unidentified
YADD

SEQ ID NO: 15410 - protein, 4 aa, unidentified
YMDD

SEQ ID NO: 15411 - protein, 4 aa, unidentified
YVDD

SEQ ID NO: 15412 - DNA, 306 bp, synthetic construct
  source 1..306: mol_type = other DNA
tgcctgtcatacgaaaccgagatactgacagtagaatatggccttctgccaatcgggaagattgtggagaaacggatagaatgcacagtttactctgtcgataacaatggtaacatttatactcagccagttgcccagtggcacgaccggggagagcaggaagtattcgaatactgtctggaggatggaagtctcattagggccactaaggaccacaaatttatgacagtcgatggccagatgctgcctatagacgaaatctttgagcgagagttggacctcatgcgagttgacaaccttcctaat

SEQ ID NO: 15413 - protein, 102 aa, synthetic construct
CLSYETEILTVEYGLLPIGKIVEKRIECTVYSVDNNGNIYTQPVAQWHDRGEQEVFEYCLEDGSLIRATKDHKFMTVDGQMLPIDEIFERELDLMRVDNLPN

SEQ ID NO: 15414 - DNA, 108 bp, synthetic construct
  source 1..108: mol_type = other DNA
atgatcaagatagctacaaggaagtatcttggcaaacaaaacgtttatgatattggagtcgaaagagatcacaactttgctctgaagaacggattcatagcttctaat

SEQ ID NO: 15415 - protein, 36 aa, synthetic construct
MIKIATRKYLGKQNVYDIGVERDHNFALKNGFIASN

SEQ ID NO: 15416 - DNA, 303 bp, synthetic construct
  source 1..303: mol_type = other DNA
tgcctgtcttatgataccgagatacttaccgttgaatatggcttcttgcctattggaaagattgtcgaagagagaattgaatgcacagtatatactgtagacaagaatggtttcgtttacacacagcccattgctcaatggcacaatcgcggcgaacaagaagtatttgagtactgtctcgaggatggaagcatcatacgagcaactaaagatcataaattcatgaccactgacgggcagatgttgccaatagatgagatattcgagcggggcttggatctcaaacaagtggatggattgcca

SEQ ID NO: 15417 - protein, 101 aa, synthetic construct
CLSYDTEILTVEYGFLPIGKIVEERIECTVYTVDKNGFVYTQPIAQWHNRGEQEVFEYCLEDGSIIRATKDHKFMTTDGQMLPIDEIFERGLDLKQVDGLP

SEQ ID NO: 15418 - DNA, 159 bp, synthetic construct
  source 1..159: mol_type = other DNA
atgaagaggactgccgatggatcagagtttgaatctcccaagaagaagaggaaagtaaagataatatctcgaaaaagtcttggtacccaaaatgtctatgatattggagtggagaaagatcacaacttccttctcaagaacggtctcgtagccagcaac

SEQ ID NO: 15419 - protein, 53 aa, synthetic construct
MKRTADGSEFESPKKKRKVKIISRKSLGTQNVYDIGVEKDHNFLLKNGLVASN

SEQ ID NO: 15420 - RNA, 21 nt, Homo sapiens
  source 1..21: mol_type = genomic RNA
cataaagtagaaagcactact

SEQ ID NO: 15421 - RNA, 23 nt, Homo sapiens
  source 1..23: mol_type = genomic RNA
tgtagtgtttcctactttatgga

SEQ ID NO: 15422 - RNA, 24 nt, Homo sapiens
  source 1..24: mol_type = genomic RNA
tttggcaatggtagaactcacact

SEQ ID NO: 15423 - RNA, 21 nt, Homo sapiens
  source 1..21: mol_type = genomic RNA
tggttctagacttgccaacta

SEQ ID NO: 15424 - RNA, 22 nt, Homo sapiens
  source 1..22: mol_type = genomic RNA
tatggcactggtagaattcact

SEQ ID NO: 15425 - RNA, 22 nt, Homo sapiens
  source 1..22: mol_type = genomic RNA
gtgaattaccgaagggccataa

SEQ ID NO: 15426 - RNA, 22 nt, Homo sapiens
  source 1..22: mol_type = genomic RNA
tggagtgtgacaatggtgtttg

SEQ ID NO: 15427 - RNA, 22 nt, Homo sapiens
  source 1..22: mol_type = genomic RNA
aacgccattatcacactaaata

SEQ ID NO: 15428 - DNA, 26 bp, Homo sapiens
  source 1..26: mol_type = genomic DNA
ctgacccttctctctctcccccagag

SEQ ID NO: 15429 - DNA, 15 bp, Homo sapiens
  source 1..15: mol_type = genomic DNA
tttctctcccacaag

SEQ ID NO: 15430 - RNA, 47 nt, synthetic construct
  source 1..47: mol_type = other RNA
gggaaataagagagaaaagaagagtaagaagaaatataagagccacc

SEQ ID NO: 15431 - RNA, 110 nt, synthetic construct
  source 1..110: mol_type = other RNA
tgataataggctggagcctcggtggccatgcttcttgccccttgggcctccccccagcccctcctccccttcctgcacccgtacccccgtggtctttgaataaagtctga

SEQ ID NO: 15432 - protein, 9 aa, unidentified
LAGLIDADG

SEQ ID NO: 15433 - DNA, 12 bp, synthetic construct
  source 1..12: mol_type = other DNA
ctggggctgggg

SEQ ID NO: 15434 - DNA, 12 bp, synthetic construct
  source 1..12: mol_type = other DNA
ccccgccccgcg

SEQ ID NO: 15435 - DNA, 62 bp, synthetic construct
  source 1..62: mol_type = other DNA
cactcctccccatcctctccctctgtccctctgtccctctgaccctgcactgtcccagcacc

SEQ ID NO: 15436 - DNA, 122 bp, synthetic construct
  source 1..122: mol_type = other DNA
caggacacagccttggatcaggacagagacttgggggccatcctgcccctccaacccgacatgtgtacctcagctttttccctcacttgcatcaataaagcttctgtgtttggaacagctaa

SEQ ID NO: 15437 - DNA, 12 bp, synthetic construct
  source 1..12: mol_type = other DNA
ggcggcggctcc

SEQ ID NO: 15438 - DNA, 21 bp, synthetic construct
  source 1..21: mol_type = other DNA
cccaagaagaagcggaaggtg

SEQ ID NO: 15439 - DNA, 48 bp, synthetic construct
  source 1..48: mol_type = other DNA
agcggcagcgagactcccgggacctcagagtccgccacacccgaaagt

SEQ ID NO: 15440 - DNA, 33 bp, synthetic construct
  source 1..33: mol_type = other DNA
gtgagcggctggcggctgttcaagaagattagc

SEQ ID NO: 15441 - protein, 6 aa, synthetic construct
GSGSGS

SEQ ID NO: 15442 - protein, 4 aa, synthetic construct
GGGS

SEQ ID NO: 15443 - protein, 11 aa, synthetic construct
VSGWRLFKKIS

SEQ ID NO: 15444 - DNA, 135 bp, synthetic construct
  source 1..135: mol_type = other DNA
accacaacacctgctccaaggccccccacacccgctccaactatagccagccaaccattgagcctcagacctgaagcttgcaggcccgcagcaggaggcgccgtccatacgcgaggcctggacttcgcgtgtgat

SEQ ID NO: 15445 - DNA, 72 bp, synthetic construct
  source 1..72: mol_type = other DNA
atttatatttgggcccctttggccggaacatgtggggtgttgcttctctcccttgtgatcactctgtattgt

SEQ ID NO: 15446 - DNA, 123 bp, synthetic construct
  source 1..123: mol_type = other DNA
aggagtaagaggagcaggctcctgcacagtgactacatgaacatgactccccgccgccccgggcccacccgcaagcattaccagccctatgccccaccacgcgacttcgcagcctatcgctcc

SEQ ID NO: 15447 - DNA, 336 bp, synthetic construct
  source 1..336: mol_type = other DNA
agggtgaaattttctagaagcgccgatgctcccgcatatcagcagggtcagaatcagctctacaatgaattgaatctcggcaggcgagaagagtacgatgttctggacaagagacggggcagggatcccgagatggggggaaagccccggagaaaaaatcctcaggaggggttgtacaatgagctgcagaaggacaagatggctgaagcctatagcgagatcggaatgaaaggcgaaagacgcagaggcaaggggcatgacggtctgtaccagggtctctctacagccaccaaggacacttatgatgcgttgcatatgcaagccttgccaccccgc

SEQ ID NO: 15448 - DNA, 54 bp, synthetic construct
  source 1..54: mol_type = other DNA
gagggcagaggaagtcttctaacatgcggtgacgtggaggagaatcccggccct

SEQ ID NO: 15449 - RNA, 1467 nt, synthetic construct
  source 1..1467: mol_type = other RNA
atggctctgccggtgaccgccctgcttctgcctcttgccctgctcttgcatgccgctcgcccgcaggtgcagcttgttcagtccggcgcggaggtaaaaaagcctggcgccagcgtgaaagtgagctgtaaggcttccggctacagcttcccagattactatatcaattgggtgcggcaggctcccgggcagggactcgagtggatgggttggatctattttgcgagcggaaactctgagtacaaccagaagttcaccggcagggttaccatgacccgcgacacgtcaagttctacggcatacatggagctgtctagtctcaggtccgaagataccgccgtgtatttctgcgcctccctgtatgattatgactggtacttcgacgtctggggccagggcaccatggtgacagtgtcttccggtggcggtggctccggcggaggtggctctggagggggtggcagcgatatcgtgatgacccagactccactgtctctgtctgtgacccctggtgagccggcgagcatctcctgcaagagttcccagagtctggtccactctaacggcaacacctacctgcactggtatctgcagaagccgggccaaagtccacagctcctgatctacaaggtttccaaccgtttcagcggggtcccggatcgcttttccggctcaggtagcggtgccgatttcaccctgaagattagtcgggtcgaggctgaggacgtcggcgtctactattgtgcagagaccagtcacgtcccctggactttcggtcaggggaccaaactggagatcaagaccacaacacctgctccaaggccccccacacccgctccaactatagccagccaaccattgagcctcagacctgaagcttgcaggcccgcagcaggaggcgccgtccatacgcgaggcctggacttcgcgtgtgatatttatatttgggcccctttggccggaacatgtggggtgttgcttctctcccttgtgatcactctgtattgtaggagtaagaggagcaggctcctgcacagtgactacatgaacatgactccccgccgccccgggcccacccgcaagcattaccagccctatgccccaccacgcgacttcgcagcctatcgctccagggtgaaattttctagaagcgccgatgctcccgcatatcagcagggtcagaatcagctctacaatgaattgaatctcggcaggcgagaagagtacgatgttctggacaagagacggggcagggatcccgagatggggggaaagccccggagaaaaaatcctcaggaggggttgtacaatgagctgcagaaggacaagatggctgaagcctatagcgagatcggaatgaaaggcgaaagacgcagaggcaaggggcatgacggtctgtaccagggtctctctacagccaccaaggacacttatgatgcgttgcatatgcaagccttgccaccccgc

SEQ ID NO: 15450 - protein, 489 aa, synthetic construct
MALPVTALLLPLALLLHAARPQVQLVQSGAEVKKPGASVKVSCKASGYSFPDYYINWVRQAPGQGLEWMGWIYFASGNSEYNQKFTGRVTMTRDTSSSTAYMELSSLRSEDTAVYFCASLYDYDWYFDVWGQGTMVTVSSGGGGSGGGGSGGGGSDIVMTQTPLSLSVTPGEPASISCKSSQSLVHSNGNTYLHWYLQKPGQSPQLLIYKVSNRFSGVPDRFSGSGSGADFTLKISRVEAEDVGVYYCAETSHVPWTFGQGTKLEIKTTTPAPRPPTPAPTIASQPLSLRPEACRPAAGGAVHTRGLDFACDIYIWAPLAGTCGVLLLSLVITLYCRSKRSRLLHSDYMNMTPRRPGPTRKHYQPYAPPRDFAAYRSRVKFSRSADAPAYQQGQNQLYNELNLGRREEYDVLDKRRGRDPEMGGKPRRKNPQEGLYNELQKDKMAEAYSEIGMKGERRRGKGHDGLYQGLSTATKDTYDALHMQALPPR

SEQ ID NO: 15451 - RNA, 2004 nt, synthetic construct
  source 1..2004: mol_type = other RNA
atggctctgccggtgaccgccctgcttctgcctcttgccctgctcttgcatgccgctcgcccgcaggtgcagcttgttcagtccggcgcggaggtaaaaaagcctggcgccagcgtgaaagtgagctgtaaggcttccggctacagcttcccagattactatatcaattgggtgcggcaggctcccgggcagggactcgagtggatgggttggatctattttgcgagcggaaactctgagtacaaccagaagttcaccggcagggttaccatgacccgcgacacgtcaagttctacggcatacatggagctgtctagtctcaggtccgaagataccgccgtgtatttctgcgcctccctgtatgattatgactggtacttcgacgtctggggccagggcaccatggtgacagtgtcttccggtggcggtggctccggcggaggtggctctggagggggtggcagcgatatcgtgatgacccagactccactgtctctgtctgtgacccctggtgagccggcgagcatctcctgcaagagttcccagagtctggtccactctaacggcaacacctacctgcactggtatctgcagaagccgggccaaagtccacagctcctgatctacaaggtttccaaccgtttcagcggggtcccggatcgcttttccggctcaggtagcggtgccgatttcaccctgaagattagtcgggtcgaggctgaggacgtcggcgtctactattgtgcagagaccagtcacgtcccctggactttcggtcaggggaccaaactggagatcaagaccacaacacctgctccaaggccccccacacccgctccaactatagccagccaaccattgagcctcagacctgaagcttgcaggcccgcagcaggaggcgccgtccatacgcgaggcctggacttcgcgtgtgatatttatatttgggcccctttggccggaacatgtggggtgttgcttctctcccttgtgatcactctgtattgtaggagtaagaggagcaggctcctgcacagtgactacatgaacatgactccccgccgccccgggcccacccgcaagcattaccagccctatgccccaccacgcgacttcgcagcctatcgctccagggtgaaattttctagaagcgccgatgctcccgcatatcagcagggtcagaatcagctctacaatgaattgaatctcggcaggcgagaagagtacgatgttctggacaagagacggggcagggatcccgagatggggggaaagccccggagaaaaaatcctcaggaggggttgtacaatgagctgcagaaggacaagatggctgaagcctatagcgagatcggaatgaaaggcgaaagacgcagaggcaaggggcatgacggtctgtaccagggtctctctacagccaccaaggacacttatgatgcgttgcatatgcaagccttgccaccccgcggaagtggtgagggcagaggaagtcttctaacatgcggtgacgtggaggagaatcccggccctatggggacgtcactcctgtgttggatggccttgtgcctcctgggagctgaccacgctgacgcatgcccctacagcaaccctagcttgtgcagcggtggcggtgggtccgaactgcctacccaggggactttttctaacgtatccaccaacgtgtcccccgccaagcccactacaaccgcctgcccatactccaacccatctttgtgttctggcggtgggggtagccctgctccgcgcccgcccactcctgcacccacaatcgcgtcccagccgctgtctctgcgcccggaagcgtgtcggcccgcggctgggggcgccgtgcacaccagaggcctggacttcgcctgcgacatctacatctgggccccattggcaggtacctgcggcgtactgctcctgagtctggttattactctgtactgcaaccaccggaacaggagacgcgtctgtaagtgccctagaccggtggtgtaa

SEQ ID NO: 15452 - protein, 667 aa, synthetic construct
MALPVTALLLPLALLLHAARPQVQLVQSGAEVKKPGASVKVSCKASGYSFPDYYINWVRQAPGQGLEWMGWIYFASGNSEYNQKFTGRVTMTRDTSSSTAYMELSSLRSEDTAVYFCASLYDYDWYFDVWGQGTMVTVSSGGGGSGGGGSGGGGSDIVMTQTPLSLSVTPGEPASISCKSSQSLVHSNGNTYLHWYLQKPGQSPQLLIYKVSNRFSGVPDRFSGSGSGADFTLKISRVEAEDVGVYYCAETSHVPWTFGQGTKLEIKTTTPAPRPPTPAPTIASQPLSLRPEACRPAAGGAVHTRGLDFACDIYIWAPLAGTCGVLLLSLVITLYCRSKRSRLLHSDYMNMTPRRPGPTRKHYQPYAPPRDFAAYRSRVKFSRSADAPAYQQGQNQLYNELNLGRREEYDVLDKRRGRDPEMGGKPRRKNPQEGLYNELQKDKMAEAYSEIGMKGERRRGKGHDGLYQGLSTATKDTYDALHMQALPPRGSGEGRGSLLTCGDVEENPGPMGTSLLCWMALCLLGADHADACPYSNPSLCSGGGGSELPTQGTFSNVSTNVSPAKPTTTACPYSNPSLCSGGGGSPAPRPPTPAPTIASQPLSLRPEACRPAAGGAVHTRGLDFACDIYIWAPLAGTCGVLLLSLVITLYCNHRNRRRVCKCPRPVV

SEQ ID NO: 15453 - protein, 157 aa, synthetic construct
MGTSLLCWMALCLLGADHADACPYSNPSLCSGGGGSELPTQGTFSNVSTNVSPAKPTTTACPYSNPSLCSGGGGSPAPRPPTPAPTIASQPLSLRPEACRPAAGGAVHTRGLDFACDIYIWAPLAGTCGVLLLSLVITLYCNHRNRRRVCKCPRPVV

SEQ ID NO: 15454 - RNA, 1755 nt, synthetic construct
  source 1..1755: mol_type = other RNA
gggggacacggaaagagcctccccgaagattgagtgaattcagtcgggcgtcccctgggcaacgtttcttgtaagcggccgatctttccaccccaaaagcattggatgaggatccgttctttccgcctcagaagccatagagcccaccgcatccccagcatgcctgctattgtcttcccaatcctcccccttgctgtcctgccccaccccaccccccagaatagaatgacacctactcagacaatgcgatgcaatttcctcattttattaggaaaggacagtgggagtggcaccttccagggtcaaggaaggcacgggggaggggcaaacaacagatggctggcaactagaaggcacagtcgaggctgatcagcgagtcgacggtttacttgtacagctcgtccatgccgagagtgatcccggcggcggtcacgaactccagcaggaccatgtgatcgcgcttctcgttggggtctttgctcagggcggactgggtgctcaggtagtggttgtcgggcagcagcacggggccgtcgccgatgggggtgttctgctggtagtggtcggcgagctgcacgctgccgtcctcgatgttgtggcggatcttgaagttcaccttgatgccgttcttctgcttgtcggccatgatatagacgttgtggctgttgtagttgtactccagcttgtgccccaggatgttgccgtcctccttgaagtcgatgcccttcagctcgatgcggttcaccagggtgtcgccctcgaacttcacctcggcgcgggtcttgtagttgccgtcgtccttgaagaagatggtgcgctcctggacgtagccttcgggcatggcggacttgaagaagtcgtgctgcttcatgtggtcggggtagcggctgaagcactgcacgccgtaggtcagggtggtcacgagggtgggccagggcacgggcagcttgccggtggtgcagatgaacttcagggtcagcttgccgtaggtggcatcgccctcgccctcgccggacacgctgaacttgtggccgtttacgtcgccgtccagctcgaccaggatgggcaccaccccggtgaacagctcctcgcccttgctcaccatggtggctttaccaacagtaccggaatgccaagcttgggtcctggggagagaggtcggtgattcggtcaacgagggagccgactgccgacgtgcgctccggaggcttgcagaatgcggaacaccgcgcgggcaggaacagggcccacactaccgccccacaccccgcctcccgcaccgccccttcccggccgctgctctcggcgcgccctgctgagcagccgctattggccacagcccatcgcggtcggcgcgctgccattgctccctggcgctgtccgtctgcgagggtactagtgagacgtgcggcttccgtttgtcacgtccggcacgccgcgaaccgcaaggaaccttcccgacttaggggcggagcaggaagcgtcgccggggggcccacaagggtagcggcgaagatccgggtgacgctgcgaacggacgtgaagaatgtgcgagacccagggtcggcgccgctgcgtttcccggaaccacgcccagagcagccgcgtccctgcgcaaacccagggctgccttggaaaaggcgcaaccccaaccccgcggccgctagttgcttgtgatttcttttcttttttattttatttccattatttgaaatgtatttgttgtagcaatgcttttgacacgaaataaataaa

SEQ ID NO: 15455 - DNA, 91 bp, synthetic construct
  source 1..91: mol_type = other DNA
tagttgcttgtgatttcttttcttttttattttatttccattatttgaaatgtatttgttgtagcaatgcttttgacacgaaataaataaa

SEQ ID NO: 15456 - RNA, 100 nt, synthetic construct
  source 1..100: mol_type = other RNA
gagaatcaaaatcggtgaatgttttagagctagaaatagcaagttaaaataaggctagtccgttatcaacttgaaaaagtggcaccgagtcggtgctttt

SEQ ID NO: 15457 - RNA, 100 nt, synthetic construct
  source 1..100: mol_type = other RNA
actcacgctggatagcctccgttttagagctagaaatagcaagttaaaataaggctagtccgttatcaacttgaaaaagtggcaccgagtcggtgctttt

SEQ ID NO: 15458 - protein, 2133 aa, synthetic construct
MPAAKRVKLDGGDKKYSIGLDIGTNSVGWAVITDEYKVPSKKFKVLGNTDRHSIKKNLIGALLFDSGETAEATRLKRTARRRYTRRKNRICYLQEIFSNEMAKVDDSFFHRLEESFLVEEDKKHERHPIFGNIVDEVAYHEKYPTIYHLRKKLVDSTDKADLRLIYLALAHMIKFRGHFLIEGDLNPDNSDVDKLFIQLVQTYNQLFEENPINASGVDAKAILSARLSKSRRLENLIAQLPGEKKNGLFGNLIALSLGLTPNFKSNFDLAEDAKLQLSKDTYDDDLDNLLAQIGDQYADLFLAAKNLSDAILLSDILRVNTEITKAPLSASMIKRYDEHHQDLTLLKALVRQQLPEKYKEIFFDQSKNGYAGYIDGGASQEEFYKFIKPILEKMDGTEELLVKLNREDLLRKQRTFDNGSIPHQIHLGELHAILRRQEDFYPFLKDNREKIEKILTFRIPYYVGPLARGNSRFAWMTRKSEETITPWNFEEVVDKGASAQSFIERMTNFDKNLPNEKVLPKHSLLYEYFTVYNELTKVKYVTEGMRKPAFLSGEQKKAIVDLLFKTNRKVTVKQLKEDYFKKIECFDSVEISGVEDRFNASLGTYHDLLKIIKDKDFLDNEENEDILEDIVLTLTLFEDREMIEERLKTYAHLFDDKVMKQLKRRRYTGWGRLSRKLINGIRDKQSGKTILDFLKSDGFANRNFMQLIHDDSLTFKEDIQKAQVSGQGDSLHEHIANLAGSPAIKKGILQTVKVVDELVKVMGRHKPENIVIEMARENQTTQKGQKNSRERMKRIEEGIKELGSQILKEHPVENTQLQNEKLYLYYLQNGRDMYVDQELDINRLSDYDVDHIVPQSFLKDDSIDNKVLTRSDKNRGKSDNVPSEEVVKKMKNYWRQLLNAKLITQRKFDNLTKAERGGLSELDKAGFIKRQLVETRQITKHVAQILDSRMNTKYDENDKLIREVKVITLKSKLVSDFRKDFQFYKVREINNYHHAHDAYLNAVVGTALIKKYPKLESEFVYGDYKVYDVRKMIAKSEQEIGKATAKYFFYSNIMNFFKTEITLANGEIRKRPLIETNGETGEIVWDKGRDFATVRKVLSMPQVNIVKKTEVQTGGFSKESILPKRNSDKLIARKKDWDPKKYGGFDSPTVAYSVLVVAKVEKGKSKKLKSVKELLGITIMERSSFEKNPIDFLEAKGYKEVKKDLIIKLPKYSLFELENGRKRMLASAGELQKGNELALPSKYVNFLYLASHYEKLKGSPEDNEQKQLFVEQHKHYLDEIIEQISEFSKRVILADANLDKVLSAYNKHRDKPIREQAENIIHLFTLTNLGAPAAFKYFDTTIDRKRYTSTKEVLDATLIHQSITGLYETRIDLSQLGGDGGAEAAAKEAAAKEAAAKEAAAKALEAEAAAKEAAAKEAAAKEAAAKAGGTAPLEEEYRLFLEAPIQNVTLLEQWKREIPKVWAEINPPGLASTQAPIHVQLLSTALPVRVRQYPITLEAKRSLRETIRKFRAAGILRPVHSPWNTPLLPVRKSGTSEYRMVQDLREVNKRVETIHPTVPNPYTLLSLLPPDRIWYSVLDLKDAFFCIPLAPESQLIFAFEWADAEEGESGQLTWTRLPQGFKNSPTLFNEALNRDLQGFRLDHPSVSLLQYVDDLLIAADTQAACLSATRDLLMTLAELGYRVSGKKAQLCQEEVTYLGFKIHKGSRSLSNSRTQAILQIPVPKTKRQVREFLGKIGYCRLFIPGFAELAQPLYAATRPGNDPLVWGEKEEEAFQSLKLALTQPPALALPSLDKPFQLFVEETSGAAKGVLTQALGPWKRPVAYLSKRLDPVAAGWPRCLRAIAAAALLTREASKLTFGQDIEITSSHNLESLLRSPPDKWLTNARITQYQVLLLDPPRVRFKQTAALNPATLLPETDDTLPIHHCLDTLDSLTSTRPDLTDQPLAQAEATLFTDGSSYIRDGKRYAGAAVVTLDSVIWAEPLPIGTSAQKAELIALTKALEWSKDKSVNIYTDSRYAFATLHVHGMIYRERGWLTAGGKAIKNAPEILALLTAVWLPKRVAVMHCKGHQKDDAPTSTGNRRADEVAREVAIRPLSTQATISAGKRTADGSEFEKRTADGSEFESPKKKAKVE

SEQ ID NO: 15459 - protein, 2133 aa, synthetic construct
MPAAKRVKLDGGDKKYSIGLDIGTNSVGWAVITDEYKVPSKKFKVLGNTDRHSIKKNLIGALLFDSGETAEATRLKRTARRRYTRRKNRICYLQEIFSNEMAKVDDSFFHRLEESFLVEEDKKHERHPIFGNIVDEVAYHEKYPTIYHLRKKLVDSTDKADLRLIYLALAHMIKFRGHFLIEGDLNPDNSDVDKLFIQLVQTYNQLFEENPINASGVDAKAILSARLSKSRRLENLIAQLPGEKKNGLFGNLIALSLGLTPNFKSNFDLAEDAKLQLSKDTYDDDLDNLLAQIGDQYADLFLAAKNLSDAILLSDILRVNTEITKAPLSASMIKRYDEHHQDLTLLKALVRQQLPEKYKEIFFDQSKNGYAGYIDGGASQEEFYKFIKPILEKMDGTEELLVKLNREDLLRKQRTFDNGSIPHQIHLGELHAILRRQEDFYPFLKDNREKIEKILTFRIPYYVGPLARGNSRFAWMTRKSEETITPWNFEEVVDKGASAQSFIERMTNFDKNLPNEKVLPKHSLLYEYFTVYNELTKVKYVTEGMRKPAFLSGEQKKAIVDLLFKTNRKVTVKQLKEDYFKKIECFDSVEISGVEDRFNASLGTYHDLLKIIKDKDFLDNEENEDILEDIVLTLTLFEDREMIEERLKTYAHLFDDKVMKQLKRRRYTGWGRLSRKLINGIRDKQSGKTILDFLKSDGFANRNFMQLIHDDSLTFKEDIQKAQVSGQGDSLHEHIANLAGSPAIKKGILQTVKVVDELVKVMGRHKPENIVIEMARENQTTQKGQKNSRERMKRIEEGIKELGSQILKEHPVENTQLQNEKLYLYYLQNGRDMYVDQELDINRLSDYDVDHIVPQSFLKDDSIDNKVLTRSDKARGKSDNVPSEEVVKKMKNYWRQLLNAKLITQRKFDNLTKAERGGLSELDKAGFIKRQLVETRQITKHVAQILDSRMNTKYDENDKLIREVKVITLKSKLVSDFRKDFQFYKVREINNYHHAHDAYLNAVVGTALIKKYPKLESEFVYGDYKVYDVRKMIAKSEQEIGKATAKYFFYSNIMNFFKTEITLANGEIRKRPLIETNGETGEIVWDKGRDFATVRKVLSMPQVNIVKKTEVQTGGFSKESILPKRNSDKLIARKKDWDPKKYGGFDSPTVAYSVLVVAKVEKGKSKKLKSVKELLGITIMERSSFEKNPIDFLEAKGYKEVKKDLIIKLPKYSLFELENGRKRMLASAGELQKGNELALPSKYVNFLYLASHYEKLKGSPEDNEQKQLFVEQHKHYLDEIIEQISEFSKRVILADANLDKVLSAYNKHRDKPIREQAENIIHLFTLTNLGAPAAFKYFDTTIDRKRYTSTKEVLDATLIHQSITGLYETRIDLSQLGGDGGAEAAAKEAAAKEAAAKEAAAKALEAEAAAKEAAAKEAAAKEAAAKAGGTAPLEEEYRLFLEAPIQNVTLLEQWKREIPKVWAEINPPGLASTQAPIHVQLLSTALPVRVRQYPITLEAKRSLRETIRKFRAAGILRPVHSPWNTPLLPVRKSGTSEYRMVQDLREVNKRVETIHPTVPNPYTLLSLLPPDRIWYSVLDLKDAFFCIPLAPESQLIFAFEWADAEEGESGQLTWTRLPQGFKNSPTLFNEALNRDLQGFRLDHPSVSLLQYVDDLLIAADTQAACLSATRDLLMTLAELGYRVSGKKAQLCQEEVTYLGFKIHKGSRSLSNSRTQAILQIPVPKTKRQVREFLGKIGYCRLFIPGFAELAQPLYAATRPGNDPLVWGEKEEEAFQSLKLALTQPPALALPSLDKPFQLFVEETSGAAKGVLTQALGPWKRPVAYLSKRLDPVAAGWPRCLRAIAAAALLTREASKLTFGQDIEITSSHNLESLLRSPPDKWLTNARITQYQVLLLDPPRVRFKQTAALNPATLLPETDDTLPIHHCLDTLDSLTSTRPDLTDQPLAQAEATLFTDGSSYIRDGKRYAGAAVVTLDSVIWAEPLPIGTSAQKAELIALTKALEWSKDKSVNIYTDSRYAFATLHVHGMIYRERGWLTAGGKAIKNAPEILALLTAVWLPKRVAVMHCKGHQKDDAPTSTGNRRADEVAREVAIRPLSTQATISAGKRTADGSEFEKRTADGSEFESPKKKAKVE

SEQ ID NO: 15460 - DNA, 16 bp, synthetic construct
  source 1..16: mol_type = other DNA
  modified_base 1: mod_base = OTHER; note = 5'6-Carboxyfluorescein-tggtcttag-ZEN quencher modified nucleotide
  modified_base 16: mod_base = OTHER; note = Nucleotide modified with 3'Iowa Black FQ (IDT) quencher
gaactttgctgccaca

SEQ ID NO: 15461 - DNA, 26 bp, synthetic construct
  source 1..26: mol_type = other DNA
gaactctcttaagactacctttctcc

SEQ ID NO: 15462 - DNA, 22 bp, synthetic construct
  source 1..22: mol_type = other DNA
cctttcttgcagttgagttgtg

SEQ ID NO: 15463 - DNA, 17 bp, synthetic construct
  source 1..17: mol_type = other DNA
  modified_base 1: mod_base = OTHER; note = 5'6-Carboxyfluorescein-acgacccat-ZEN quencher modified nucleotide
  modified_base 17: mod_base = OTHER; note = Nucleotide modified with 3'Iowa Black FQ (IDT) quencher
acacccaaaggattgag

SEQ ID NO: 15464 - DNA, 25 bp, synthetic construct
  source 1..25: mol_type = other DNA
gaatctgaactctcttcaacctttg

SEQ ID NO: 15465 - DNA, 22 bp, synthetic construct
  source 1..22: mol_type = other DNA
atcttaagctgctgggtattgt

SEQ ID NO: 15466 - DNA, 20 bp, synthetic construct
  source 1..20: mol_type = other DNA
gaggtgtccgtgttcctaaa

SEQ ID NO: 15467 - DNA, 23 bp, synthetic construct
  source 1..23: mol_type = other DNA
agaatctgaactctcttcaacct

SEQ ID NO: 15468 - DNA, 18 bp, synthetic construct
  source 1..18: mol_type = other DNA
  modified_base 1: mod_base = OTHER; note = 5'6-Carboxyfluorescein-actgtaaac-ZEN quencher modified nucleotide
  modified_base 18: mod_base = OTHER; note = Nucleotide modified with 3'Iowa Black FQ (IDT) quencher
ctacacaggtgagttggc

SEQ ID NO: 15469 - DNA, 22 bp, synthetic construct
  source 1..22: mol_type = other DNA
gacctcaatcctttgggtgtat

SEQ ID NO: 15470 - DNA, 11 bp, synthetic construct
  source 1..11: mol_type = other DNA
  modified_base 1: mod_base = OTHER; note = 5'Hexane-tccctaggt-ZEN quencher modified nucleotide
  modified_base 11: mod_base = OTHER; note = Nucleotide modified with 3'Iowa Black FQ (IDT) quencher
ggcctgagcag

SEQ ID NO: 15471 - DNA, 26 bp, synthetic construct
  source 1..26: mol_type = other DNA
  modified_base 1: mod_base = OTHER; note = Carboxy-X-rhodamine modified nucleotide
  modified_base 26: mod_base = OTHER; note = Nucleotide modified with 3'Iowa Black RQ quencher
agagaactgagtggagtcaaggctga

SEQ ID NO: 15472 - DNA, 20 bp, synthetic construct
  source 1..20: mol_type = other DNA
tccaggagggagaattgatg

SEQ ID NO: 15473 - DNA, 18 bp, synthetic construct
  source 1..18: mol_type = other DNA
atggtccgtctcaggaaa

SEQ ID NO: 15474 - DNA, 72 bp, synthetic construct
  source 1..72: mol_type = other DNA
atctacatctgggcgcccttggccgggacttgtggggtccttctcctgtcactggttatcaccctttactgc

SEQ ID NO: 15475 - DNA, 72 bp, synthetic construct
  source 1..72: mol_type = other DNA
atctacatttgggcccctctggctggtacttgcggggtcctgctgctttcactcgtgatcactctttactgt

SEQ ID NO: 15476 - protein, 28 aa, synthetic construct
IYIWAPLAGTCGVLLLSLVITLYCNHRN

SEQ ID NO: 15477 - DNA, 84 bp, synthetic construct
  source 1..84: mol_type = other DNA
atctacatctgggcccctctggccggcacctgtggcgtgctgctgctgagcctggtgatcaccctgtactgcaaccaccggaac

SEQ ID NO: 15478 - DNA, 336 bp, synthetic construct
  source 1..336: mol_type = other DNA
agagtgaagttcagcagatccgccgacgcccctgcctaccagcagggacagaaccagctgtacaacgagctgaacctgggcagacgggaagagtacgacgtgctggacaagcggagaggccgggaccccgagatgggcggaaagcccagacggaagaacccccaggaaggcctgtataacgaactgcagaaagacaagatggccgaggcctacagcgagatcggcatgaagggcgagcggaggcgcggcaagggccacgatggcctgtaccagggcctgagcaccgccaccaaggacacctacgacgccctgcacatgcaggccctgccccccaga

SEQ ID NO: 15479 - DNA, 336 bp, synthetic construct
  source 1..336: mol_type = other DNA
agagtgaagttcagcaggagcgcagacgcccccgcgtaccagcagggccagaaccagctctataacgagctcaatctaggacgaagagaggagtacgatgttttggacaagagacgtggccgggaccctgagatggggggaaagccgagaaggaagaaccctcaggaaggcctgtacaatgaactgcagaaagataagatggcggaggcctacagtgagattgggatgaaaggcgagcgccggaggggcaaggggcacgatggcctttaccagggtctcagtacagccaccaaggacacctacgacgcccttcacatgcaggccctgccccctcgc

SEQ ID NO: 15480 - protein, 42 aa, synthetic construct
KRGRKKLLYIFKQPFMRPVQTTQEEDGCSCRFPEEEEGGCEL

SEQ ID NO: 15481 - DNA, 126 bp, synthetic construct
  source 1..126: mol_type = other DNA
aaacggggcagaaagaaactcctgtatatattcaaacaaccatttatgagaccagtacaaactactcaagaggaagatggctgtagctgccgatttccagaagaagaagaaggaggatgtgaactg

SEQ ID NO: 15482 - DNA, 135 bp, synthetic construct
  source 1..135: mol_type = other DNA
accacgacgccagcgccgcgaccaccaacaccggcgcccaccatcgcgtcgcagcccctgtccctgcgcccagaggcgtgccggccagcggcggggggcgcagtgcacacgagggggctggacttcgcctgtgat

SEQ ID NO: 15483 - DNA, 135 bp, synthetic construct
  source 1..135: mol_type = other DNA
accactaccccagcaccgaggccacccaccccggctcctaccatcgcctcccagcctctgtccctgcgtccggaggcatgtagacccgcagctggtggggccgtgcatacccggggtcttgacttcgcctgcgat

SEQ ID NO: 15484 - protein, 55 aa, synthetic construct
FVPVFLPAKPTTTPAPRPPTPAPTIASQPLSLRPEACRPAAGGAVHTRGLDFACD

SEQ ID NO: 15485 - DNA, 165 bp, synthetic construct
  source 1..165: mol_type = other DNA
ttcgtgcccgtgttcctgcccgccaaacctaccaccacccctgcccctagacctcccaccccagccccaacaatcgccagccagcctctgtctctgcggcccgaagcctgtagacctgctgccggcggagccgtgcacaccagaggcctggacttcgcctgcgac

SEQ ID NO: 15486 - protein, 106 aa, synthetic construct
DIQMTQSPSSLSASVGDRVTITCRASQSISSYLNWYQQKPGKAPKLLIYAASSLQSGVPSRFSGSGSGTDFTLTISSLQPEDFATYYCQQKYDLLTFGGGTKVEIK

SEQ ID NO: 15487 - DNA, 318 bp, synthetic construct
  source 1..318: mol_type = other DNA
gacatccagatgacccagtctccatcctccctgtctgcatctgtaggagacagagtcaccatcacttgccgggcaagtcagagcattagcagctatttaaattggtatcagcagaaaccagggaaagcccctaagctcctgatctatgctgcatccagtttgcaaagtggggtcccatcaaggttcagtggcagtggatctgggacagatttcactctcaccatcagcagtctgcaacctgaagattttgcaacttactactgtcagcaaaaatacgacctcctcacttttggcggagggaccaaggttgagatcaaa

SEQ ID NO: 15488 - protein, 119 aa, synthetic construct
QLQLQESGPGLVKPSETLSLTCTVSGGSISSSSYYWGWIRQPPGKGLEWIGSISYSGSTYYNPSLKSRVTISVDTSKNQFSLKLSSVTAADTAVYYCARDRGDTILDVWGQGTMVTVSS

SEQ ID NO: 15489 - DNA, 357 bp, synthetic construct
  source 1..357: mol_type = other DNA
cagctgcagctgcaggagtcgggcccaggactggtgaagccttcggagaccctgtccctcacctgcactgtctctggtggctccatcagcagtagtagttactactggggctggatccgccagcccccagggaaggggctggagtggattgggagtatctcctatagtgggagcacctactacaacccgtccctcaagagtcgagtcaccatatccgtagacacgtccaagaaccagttctccctgaagctgagttctgtgaccgccgcagacacggcggtgtactactgcgccagagatcgtggagacaccatactagacgtatggggtcagggtacaatggtcaccgtcagctca

SEQ ID NO: 15490 - protein, 480 aa, synthetic construct
DIQMTQSPSSLSASVGDRVTITCRASQSISSYLNWYQQKPGKAPKLLIYAASSLQSGVPSRFSGSGSGTDFTLTISSLQPEDFATYYCQQKYDLLTFGGGTKVEIKGSTSGSGKPGSGEGSTKGQLQLQESGPGLVKPSETLSLTCTVSGGSISSSSYYWGWIRQPPGKGLEWIGSISYSGSTYYNPSLKSRVTISVDTSKNQFSLKLSSVTAADTAVYYCARDRGDTILDVWGQGTMVTVSSFVPVFLPAKPTTTPAPRPPTPAPTIASQPLSLRPEACRPAAGGAVHTRGLDFACDIYIWAPLAGTCGVLLLSLVITLYCNHRNKRGRKKLLYIFKQPFMRPVQTTQEEDGCSCRFPEEEEGGCELRVKFSRSADAPAYQQGQNQLYNELNLGRREEYDVLDKRRGRDPEMGGKPRRKNPQEGLYNELQKDKMAEAYSEIGMKGERRRGKGHDGLYQGLSTATKDTYDALHMQALPPR

SEQ ID NO: 15491 - DNA, 1440 bp, synthetic construct
  source 1..1440: mol_type = other DNA
gacatccagatgacccagtctccatcctccctgtctgcatctgtaggagacagagtcaccatcacttgccgggcaagtcagagcattagcagctatttaaattggtatcagcagaaaccagggaaagcccctaagctcctgatctatgctgcatccagtttgcaaagtggggtcccatcaaggttcagtggcagtggatctgggacagatttcactctcaccatcagcagtctgcaacctgaagattttgcaacttactactgtcagcaaaaatacgacctcctcacttttggcggagggaccaaggttgagatcaaaggcagcaccagcggctccggcaagcctggctctggcgagggcagcacaaagggacagctgcagctgcaggagtcgggcccaggactggtgaagccttcggagaccctgtccctcacctgcactgtctctggtggctccatcagcagtagtagttactactggggctggatccgccagcccccagggaaggggctggagtggattgggagtatctcctatagtgggagcacctactacaacccgtccctcaagagtcgagtcaccatatccgtagacacgtccaagaaccagttctccctgaagctgagttctgtgaccgccgcagacacggcggtgtactactgcgccagagatcgtggagacaccatactagacgtatggggtcagggtacaatggtcaccgtcagctcattcgtgcccgtgttcctgcccgccaaacctaccaccacccctgcccctagacctcccaccccagccccaacaatcgccagccagcctctgtctctgcggcccgaagcctgtagacctgctgccggcggagccgtgcacaccagaggcctggacttcgcctgcgacatctacatctgggcccctctggccggcacctgtggcgtgctgctgctgagcctggtgatcaccctgtactgcaaccaccggaacaaacggggcagaaagaaactcctgtatatattcaaacaaccatttatgagaccagtacaaactactcaagaggaagatggctgtagctgccgatttccagaagaagaagaaggaggatgtgaactgagagtgaagttcagcagatccgccgacgcccctgcctaccagcagggacagaaccagctgtacaacgagctgaacctgggcagacgggaagagtacgacgtgctggacaagcggagaggccgggaccccgagatgggcggaaagcccagacggaagaacccccaggaaggcctgtataacgaactgcagaaagacaagatggccgaggcctacagcgagatcggcatgaagggcgagcggaggcgcggcaagggccacgatggcctgtaccagggcctgagcaccgccaccaaggacacctacgacgccctgcacatgcaggccctgccccccaga

SEQ ID NO: 15492 - protein, 501 aa, synthetic construct
MALPVTALLLPLALLLHAARPDIQMTQSPSSLSASVGDRVTITCRASQSISSYLNWYQQKPGKAPKLLIYAASSLQSGVPSRFSGSGSGTDFTLTISSLQPEDFATYYCQQKYDLLTFGGGTKVEIKGSTSGSGKPGSGEGSTKGQLQLQESGPGLVKPSETLSLTCTVSGGSISSSSYYWGWIRQPPGKGLEWIGSISYSGSTYYNPSLKSRVTISVDTSKNQFSLKLSSVTAADTAVYYCARDRGDTILDVWGQGTMVTVSSFVPVFLPAKPTTTPAPRPPTPAPTIASQPLSLRPEACRPAAGGAVHTRGLDFACDIYIWAPLAGTCGVLLLSLVITLYCNHRNKRGRKKLLYIFKQPFMRPVQTTQEEDGCSCRFPEEEEGGCELRVKFSRSADAPAYQQGQNQLYNELNLGRREEYDVLDKRRGRDPEMGGKPRRKNPQEGLYNELQKDKMAEAYSEIGMKGERRRGKGHDGLYQGLSTATKDTYDALHMQALPPR

SEQ ID NO: 15493 - DNA, 1503 bp, synthetic construct
  source 1..1503: mol_type = other DNA
atggctctgccggtgaccgccctgcttctgcctcttgccctgctcttgcatgccgctcgcccggacatccagatgacccagtctccatcctccctgtctgcatctgtaggagacagagtcaccatcacttgccgggcaagtcagagcattagcagctatttaaattggtatcagcagaaaccagggaaagcccctaagctcctgatctatgctgcatccagtttgcaaagtggggtcccatcaaggttcagtggcagtggatctgggacagatttcactctcaccatcagcagtctgcaacctgaagattttgcaacttactactgtcagcaaaaatacgacctcctcacttttggcggagggaccaaggttgagatcaaaggcagcaccagcggctccggcaagcctggctctggcgagggcagcacaaagggacagctgcagctgcaggagtcgggcccaggactggtgaagccttcggagaccctgtccctcacctgcactgtctctggtggctccatcagcagtagtagttactactggggctggatccgccagcccccagggaaggggctggagtggattgggagtatctcctatagtgggagcacctactacaacccgtccctcaagagtcgagtcaccatatccgtagacacgtccaagaaccagttctccctgaagctgagttctgtgaccgccgcagacacggcggtgtactactgcgccagagatcgtggagacaccatactagacgtatggggtcagggtacaatggtcaccgtcagctcattcgtgcccgtgttcctgcccgccaaacctaccaccacccctgcccctagacctcccaccccagccccaacaatcgccagccagcctctgtctctgcggcccgaagcctgtagacctgctgccggcggagccgtgcacaccagaggcctggacttcgcctgcgacatctacatctgggcccctctggccggcacctgtggcgtgctgctgctgagcctggtgatcaccctgtactgcaaccaccggaacaaacggggcagaaagaaactcctgtatatattcaaacaaccatttatgagaccagtacaaactactcaagaggaagatggctgtagctgccgatttccagaagaagaagaaggaggatgtgaactgagagtgaagttcagcagatccgccgacgcccctgcctaccagcagggacagaaccagctgtacaacgagctgaacctgggcagacgggaagagtacgacgtgctggacaagcggagaggccgggaccccgagatgggcggaaagcccagacggaagaacccccaggaaggcctgtataacgaactgcagaaagacaagatggccgaggcctacagcgagatcggcatgaagggcgagcggaggcgcggcaagggccacgatggcctgtaccagggcctgagcaccgccaccaaggacacctacgacgccctgcacatgcaggccctgccccccaga

SEQ ID NO: 15494 - protein, 119 aa, synthetic construct
QVKLEESGGGLVQAGRSLRLSCAASEHTFSSHVMGWFRQAPGKERESVAVIGWRDISTSYADSVKGRFTISRDNAKKTLYLQMNSLKPEDTAVYYCAARRIDAADFDSWGQGTQVTVSS

SEQ ID NO: 15495 - DNA, 357 bp, synthetic construct
  source 1..357: mol_type = other DNA
caggtcaaactggaagaatctggcggaggcctggtgcaggcaggacggagcctgcgcctgagctgcgcagcatccgagcacaccttcagctcccacgtgatgggctggtttcggcaggccccaggcaaggagagagagagcgtggccgtgatcggctggagggacatctccacatcttacgccgattccgtgaagggccggttcaccatcagccgggacaacgccaagaagacactgtatctgcagatgaacagcctgaagcccgaggacaccgccgtgtactattgcgcagcaaggagaatcgacgcagcagactttgattcctggggccagggcacccaggtgacagtgtctagc

SEQ ID NO: 15496 - protein, 118 aa, synthetic construct
EVQLVESGGGLVQAGGSLRLSCAASGRTFTMGWFRQAPGKEREFVAAISLSPTLAYYAESVKGRFTISRDNAKNTVVLQMNSLKPEDTALYYCAADRKSVMSIRPDYWGQGTQVTVSS

SEQ ID NO: 15497 - DNA, 354 bp, synthetic construct
  source 1..354: mol_type = other DNA
gaggtgcagctggtggagagcggaggcggcctggtgcaggccggaggctctctgaggctgagctgtgcagcatccggaagaaccttcacaatgggctggtttaggcaggcaccaggaaaggagagggagttcgtggcagcaatcagcctgtcccctaccctggcctactatgccgagagcgtgaagggcaggtttaccatctcccgcgataacgccaagaatacagtggtgctgcagatgaactccctgaaacctgaggacacagccctgtactattgtgccgccgatcggaagagcgtgatgagcattagaccagactattgggggcagggaacacaggtgaccgtgagcagc

SEQ ID NO: 15498 - protein, 465 aa, synthetic construct
QVKLEESGGGLVQAGRSLRLSCAASEHTFSSHVMGWFRQAPGKERESVAVIGWRDISTSYADSVKGRFTISRDNAKKTLYLQMNSLKPEDTAVYYCAARRIDAADFDSWGQGTQVTVSSGGGGSEVQLVESGGGLVQAGGSLRLSCAASGRTFTMGWFRQAPGKEREFVAAISLSPTLAYYAESVKGRFTISRDNAKNTVVLQMNSLKPEDTALYYCAADRKSVMSIRPDYWGQGTQVTVSSTTTPAPRPPTPAPTIASQPLSLRPEACRPAAGGAVHTRGLDFACDIYIWAPLAGTCGVLLLSLVITLYCKRGRKKLLYIFKQPFMRPVQTTQEEDGCSCRFPEEEEGGCELRVKFSRSADAPAYQQGQNQLYNELNLGRREEYDVLDKRRGRDPEMGGKPRRKNPQEGLYNELQKDKMAEAYSEIGMKGERRRGKGHDGLYQGLSTATKDTYDALHMQALPPR

SEQ ID NO: 15499 - DNA, 1398 bp, synthetic construct
  source 1..1398: mol_type = other DNA
caggtcaaactggaagaatctggcggaggcctggtgcaggcaggacggagcctgcgcctgagctgcgcagcatccgagcacaccttcagctcccacgtgatgggctggtttcggcaggccccaggcaaggagagagagagcgtggccgtgatcggctggagggacatctccacatcttacgccgattccgtgaagggccggttcaccatcagccgggacaacgccaagaagacactgtatctgcagatgaacagcctgaagcccgaggacaccgccgtgtactattgcgcagcaaggagaatcgacgcagcagactttgattcctggggccagggcacccaggtgacagtgtctagcggaggaggaggatctgaggtgcagctggtggagagcggaggcggcctggtgcaggccggaggctctctgaggctgagctgtgcagcatccggaagaaccttcacaatgggctggtttaggcaggcaccaggaaaggagagggagttcgtggcagcaatcagcctgtcccctaccctggcctactatgccgagagcgtgaagggcaggtttaccatctcccgcgataacgccaagaatacagtggtgctgcagatgaactccctgaaacctgaggacacagccctgtactattgtgccgccgatcggaagagcgtgatgagcattagaccagactattgggggcagggaacacaggtgaccgtgagcagcaccacgacgccagcgccgcgaccaccaacaccggcgcccaccatcgcgtcgcagcccctgtccctgcgcccagaggcgtgccggccagcggcggggggcgcagtgcacacgagggggctggacttcgcctgtgatatctacatctgggcgcccttggccgggacttgtggggtccttctcctgtcactggttatcaccctttactgcaaacggggcagaaagaaactcctgtatatattcaaacaaccatttatgagaccagtacaaactactcaagaggaagatggctgtagctgccgatttccagaagaagaagaaggaggatgtgaactgagagtgaagttcagcaggagcgcagacgcccccgcgtaccagcagggccagaaccagctctataacgagctcaatctaggacgaagagaggagtacgatgttttggacaagagacgtggccgggaccctgagatggggggaaagccgagaaggaagaaccctcaggaaggcctgtacaatgaactgcagaaagataagatggcggaggcctacagtgagattgggatgaaaggcgagcgccggaggggcaaggggcacgatggcctttaccagggtctcagtacagccaccaaggacacctacgacgcccttcacatgcaggccctgccccctcgctaa

SEQ ID NO: 15500 - protein, 486 aa, synthetic construct
MALPVTALLLPLALLLHAARPQVKLEESGGGLVQAGRSLRLSCAASEHTFSSHVMGWFRQAPGKERESVAVIGWRDISTSYADSVKGRFTISRDNAKKTLYLQMNSLKPEDTAVYYCAARRIDAADFDSWGQGTQVTVSSGGGGSEVQLVESGGGLVQAGGSLRLSCAASGRTFTMGWFRQAPGKEREFVAAISLSPTLAYYAESVKGRFTISRDNAKNTVVLQMNSLKPEDTALYYCAADRKSVMSIRPDYWGQGTQVTVSSTTTPAPRPPTPAPTIASQPLSLRPEACRPAAGGAVHTRGLDFACDIYIWAPLAGTCGVLLLSLVITLYCKRGRKKLLYIFKQPFMRPVQTTQEEDGCSCRFPEEEEGGCELRVKFSRSADAPAYQQGQNQLYNELNLGRREEYDVLDKRRGRDPEMGGKPRRKNPQEGLYNELQKDKMAEAYSEIGMKGERRRGKGHDGLYQGLSTATKDTYDALHMQALPPR

SEQ ID NO: 15501 - DNA, 1461 bp, synthetic construct
  source 1..1461: mol_type = other DNA
atggctctgcccgtcaccgctctgctgctgcctctggctctgctgctgcacgctgctcgccctcaggtcaaactggaagaatctggcggaggcctggtgcaggcaggacggagcctgcgcctgagctgcgcagcatccgagcacaccttcagctcccacgtgatgggctggtttcggcaggccccaggcaaggagagagagagcgtggccgtgatcggctggagggacatctccacatcttacgccgattccgtgaagggccggttcaccatcagccgggacaacgccaagaagacactgtatctgcagatgaacagcctgaagcccgaggacaccgccgtgtactattgcgcagcaaggagaatcgacgcagcagactttgattcctggggccagggcacccaggtgacagtgtctagcggaggaggaggatctgaggtgcagctggtggagagcggaggcggcctggtgcaggccggaggctctctgaggctgagctgtgcagcatccggaagaaccttcacaatgggctggtttaggcaggcaccaggaaaggagagggagttcgtggcagcaatcagcctgtcccctaccctggcctactatgccgagagcgtgaagggcaggtttaccatctcccgcgataacgccaagaatacagtggtgctgcagatgaactccctgaaacctgaggacacagccctgtactattgtgccgccgatcggaagagcgtgatgagcattagaccagactattgggggcagggaacacaggtgaccgtgagcagcaccacgacgccagcgccgcgaccaccaacaccggcgcccaccatcgcgtcgcagcccctgtccctgcgcccagaggcgtgccggccagcggcggggggcgcagtgcacacgagggggctggacttcgcctgtgatatctacatctgggcgcccttggccgggacttgtggggtccttctcctgtcactggttatcaccctttactgcaaacggggcagaaagaaactcctgtatatattcaaacaaccatttatgagaccagtacaaactactcaagaggaagatggctgtagctgccgatttccagaagaagaagaaggaggatgtgaactgagagtgaagttcagcaggagcgcagacgcccccgcgtaccagcagggccagaaccagctctataacgagctcaatctaggacgaagagaggagtacgatgttttggacaagagacgtggccgggaccctgagatggggggaaagccgagaaggaagaaccctcaggaaggcctgtacaatgaactgcagaaagataagatggcggaggcctacagtgagattgggatgaaaggcgagcgccggaggggcaaggggcacgatggcctttaccagggtctcagtacagccaccaaggacacctacgacgcccttcacatgcaggccctgccccctcgctaa

SEQ ID NO: 15502 - protein, 267 aa, synthetic construct
MALPVTALLLPLALLLHAARPDIVLTQSPPSLAMSLGKRATISCRASESVTILGSHLIHWYQQKPGQPPTLLIQLASNVQTGVPARFSGSGSRTDFTLTIDPVEEDDVAVYYCLQSRTIPRTFGGGTKLEIKGSTSGSGKPGSGEGSTKGQIQLVQSGPELKKPGETVKISCKASGYTFTDYSINWVKRAPGKGLKWMGWINTETREPAYAYDFRGRFAFSLETSASTAYLQINNLKYEDTATYFCALDYSYAMDYWGQGTSVTVSS

SEQ ID NO: 15503 - protein, 504 aa, synthetic construct
MALPVTALLLPLALLLHAARPDIVLTQSPPSLAMSLGKRATISCRASESVTILGSHLIHWYQQKPGQPPTLLIQLASNVQTGVPARFSGSGSRTDFTLTIDPVEEDDVAVYYCLQSRTIPRTFGGGTKLEIKGSTSGSGKPGSGEGSTKGQIQLVQSGPELKKPGETVKISCKASGYTFTDYSINWVKRAPGKGLKWMGWINTETREPAYAYDFRGRFAFSLETSASTAYLQINNLKYEDTATYFCALDYSYAMDYWGQGTSVTVSSFVPVFLPAKPTTTPAPRPPTPAPTIASQPLSLRPEACRPAAGGAVHTRGLDFACDIYIWAPLAGTCGVLLLSLVITLYCNHRNKRGRKKLLYIFKQPFMRPVQTTQEEDGCSCRFPEEEEGGCELRVKFSRSADAPAYQQGQNQLYNELNLGRREEYDVLDKRRGRDPEMGGKPRRKNPQEGLYNELQKDKMAEAYSEIGMKGERRRGKGHDGLYQGLSTATKDTYDALHMQALPPR

SEQ ID NO: 15504 - DNA, 1515 bp, synthetic construct
  source 1..1515: mol_type = other DNA
atggctctgcctgtgacagctctgctgctgcctctggccctgctgctgcatgccgccagacctgatatcgtgctgacccagagccctcccagcctggccatgtctctgggcaagagagccaccatcagctgcagagccagcgagagcgtgaccatcctgggcagccacctgatccactggtatcagcagaagcccggccagccccctaccctgctgattcagctggcctccaatgtgcagaccggcgtgccagccagattttccggcagcggcagcagaaccgacttcaccctgaccatcgaccccgtggaagaggacgacgtggccgtgtactactgcctgcagagcagaaccatcccccggacctttggcggaggcaccaagctggaaatcaagggcagcaccagcggctccggcaagcctggatctggcgagggatctaccaagggacagatccagctggtgcagagcggccctgagctgaagaaacccggcgagacagtgaagatctcctgcaaggccagcggctacaccttcaccgactacagcatcaactgggtcaagagggcccctggcaagggcctgaagtggatgggctggatcaacaccgaaaccagagagcccgcctacgcctacgacttcagaggcagattcgccttcagcctggaaaccagcgccagcaccgcctacctgcagatcaacaacctgaagtacgaggacaccgccacctacttttgcgccctggactacagctacgccatggactattggggccagggcaccagcgtgaccgtgtcctctttcgtgcctgtgtttctgcctgccaagcccaccacaacccctgcccctagacctcctacacccgcccctacaatcgccagccagcctctgtctctgaggcccgaggcttgtagacctgctgctggcggagccgtgcacaccagaggactggatttcgcctgcgacatctacatctgggcccctctggccggcacatgtggcgtgctgctgctgagcctcgtgatcaccctgtactgcaaccaccggaacaagcggggcagaaagaagctgctgtacatcttcaagcagcccttcatgcggcccgtgcagaccacccaggaagaggacggctgctcctgcagattccccgaggaagaagaaggcggctgcgagctgagagtgaagttcagcagaagcgccgacgcccctgcctatcagcagggccagaaccagctgtacaacgagctgaacctgggcagacgggaagagtacgacgtgctggacaagcggagaggcagggaccctgagatgggcggcaagcccagaagaaagaacccccaggaaggcctgtataacgaactgcagaaagacaagatggccgaggcctacagcgagatcggaatgaagggcgagcggagaagaggcaagggccacgatggcctgtaccagggcctgagcaccgccaccaaggacacctatgacgccctgcacatgcaggccctgccccccagatga

SEQ ID NO: 15505 - protein, 378 aa, synthetic construct
MALPVTALLLPLALLLHAARPEVQLLESGGGLVQPGGSLRLSCAASGFTFSSYAMSWVRQAPGKGLEWVSSISGSGDYIYYADSVKGRFTISRDISKNTLYLQMNSLRAEDTAVYYCAKEGTGANSSLADYRGQGTLVTVSSFVPVFLPAKPTTTPAPRPPTPAPTIASQPLSLRPEACRPAAGGAVHTRGLDFACDIYIWAPLAGTCGVLLLSLVITLYCNHRNRSKRSRLLHSDYMNMTPRRPGPTRKHYQPYAPPRDFAAYRSRVKFSRSADAPAYQQGQNQLYNELNLGRREEYDVLDKRRGRDPEMGGKPRRKNPQEGLYNELQKDKMAEAYSEIGMKGERRRGKGHDGLYQGLSTATKDTYDALHMQALPPR

SEQ ID NO: 15506 - DNA, 1137 bp, synthetic construct
  source 1..1137: mol_type = other DNA
atggccctgcctgttacagctctgctgctgcctctggctctgcttctgcatgccgccagacctgaggtgcagctgttggagtctgggggaggcttggtacagcctggggggtccctgagactctcctgtgcagcctctggattcacctttagcagctatgccatgagctgggtccgccaggctccagggaaggggctggagtgggtctcatctattagtggtagtggtgattacatatactacgcagactccgtgaagggccggttcaccatctccagagacatatccaagaacacgctgtatctgcaaatgaacagcctgagagccgaggacacggccgtatattactgtgcgaaagaaggtacgggtgccaacagcagcttggcagactacagaggccagggcaccctggtcaccgtctcctcattcgtgcccgtgttcctgcctgccaagcctacaacaacccctgctcctagacctcctacaccagctcctacaatcgccagccagcctctgtctctgaggcctgaagcttgtagacctgctgctggcggagccgtgcataccagaggactggatttcgcctgcgacatctacatctgggcccctctggctggaacatgtggcgttttgctgctgagcctcgtgatcaccctgtactgcaaccaccggaacagaagcaagcggagccggctgctgcacagcgactacatgaacatgacccccagacggcctggccccaccagaaagcactaccagccttacgcccctcccagagacttcgccgcctaccggtccagagtgaagttcagcagaagcgccgacgcccctgcctatcagcagggccagaaccagctgtacaacgagctgaacctgggcagacgggaagagtacgatgtgctggacaaaagacgtggccgggaccctgagatggggggaaagccgagaaggaagaaccctcaggaaggcctgtacaatgaactgcagaaagataagatggcggaggcctacagtgagattgggatgaaaggcgagcgccggaggggcaaggggcacgatggcctttaccagggtctcagtacagccaccaaggacacctacgacgcccttcacatgcaggccctgccccctcgctaa

SEQ ID NO: 15507 - protein, 379 aa, synthetic construct
MALPVTALLLPLALLLHAARPEVQLLESGGGLVQPGGSLRLSCAASGFTFSSYAMSWVRQAPGKGLEWVSSISGSGDYIYYADSVKGRFTISRDISKNTLYLQMNSLRAEDTAVYYCAKEGTGANSSLADYRGQGTLVTVSSFVPVFLPAKPTTTPAPRPPTPAPTIASQPLSLRPEACRPAAGGAVHTRGLDFACDIYIWAPLAGTCGVLLLSLVITLYCNHRNKRGRKKLLYIFKQPFMRPVQTTQEEDGCSCRFPEEEEGGCELRVKFSRSADAPAYQQGQNQLYNELNLGRREEYDVLDKRRGRDPEMGGKPRRKNPQEGLYNELQKDKMAEAYSEIGMKGERRRGKGHDGLYQGLSTATKDTYDALHMQALPPR

SEQ ID NO: 15508 - DNA, 1140 bp, synthetic construct
  source 1..1140: mol_type = other DNA
atggccctgcctgttacagctctgctgctgcctctggctctgcttctgcatgccgccagacctgaggtgcagctgttggagtctgggggaggcttggtacagcctggggggtccctgagactctcctgtgcagcctctggattcacctttagcagctatgccatgagctgggtccgccaggctccagggaaggggctggagtgggtctcatctattagtggtagtggtgattacatatactacgcagactccgtgaagggccggttcaccatctccagagacatatccaagaacacgctgtatctgcaaatgaacagcctgagagccgaggacacggccgtatattactgtgcgaaagaaggtacgggtgccaacagcagcttggcagactacagaggccagggcaccctggtcaccgtctcctcattcgtgcccgtgttcctgcctgccaagcctacaacaacccctgctcctagacctcctacaccagctcctacaatcgccagccagcctctgtctctgaggcctgaagcttgtagacctgctgctggcggagccgtgcataccagaggactggatttcgcctgcgacatctacatctgggcccctctggctggaacatgtggcgttttgctgctgagcctcgtgatcaccctgtactgcaaccaccggaacaagcggggcagaaagaagctgctgtacatcttcaagcagcccttcatgcggcccgtgcagaccacccaggaagaggacggctgctcctgcagattccccgaggaagaagaaggcggctgcgagctgagagtgaagttcagcagaagcgccgacgcccctgcctatcagcagggccagaaccagctgtacaacgagctgaacctgggcagacgggaagagtacgacgtgctggacaagcggagaggcagggaccctgagatgggcggcaagcccagaagaaagaacccccaggaaggcctgtataacgaactgcagaaagacaagatggccgaggcctacagcgagatcggaatgaagggcgagcggagaagaggcaagggccacgatggcctgtaccagggcctgagcaccgccaccaaggacacctatgacgccctgcacatgcaggccctgccccccagatga

SEQ ID NO: 15509 - protein, 119 aa, synthetic construct
QVQLVQSGAEVKKPGASVKVSCKASGYSFPDYYINWVRQAPGQGLEWMGWIYFASGNSEYNQKFTGRVTMTRDTSSSTAYMELSSLRSEDTAVYFCASLYDYDWYFDVWGQGTMVTVSS

SEQ ID NO: 15510 - protein, 112 aa, synthetic construct
DIVMTQTPLSLSVTPGEPASISCKSSQSLVHSNGNTYLHWYLQKPGQSPQLLIYKVSNRFSGVPDRFSGSGSGADFTLKISRVEAEDVGVYYCAETSHVPWTFGQGTKLEIK

SEQ ID NO: 15511 - protein, 107 aa, synthetic construct
DIQMTQTTSSLSASLGDRVTISCRASQDISKYLNWYQQKPDGTVKLLIYHTSRLHSGVPSRFSGSGSGTDYSLTISNLEQEDIATYFCQQGNTLPYTFGGGTKLEIT

SEQ ID NO: 15512 - DNA, 321 bp, synthetic construct
  source 1..321: mol_type = other DNA
gacatccagatgacacagactacatcctccctgtctgcctctctgggagacagagtcaccatcagttgcagggcaagtcaggacattagtaaatatttaaattggtatcagcagaaaccagatggaactgttaaactcctgatctaccatacatcaagattacactcaggagtcccatcaaggttcagtggcagtgggtctggaacagattattctctcaccattagcaacctggagcaagaagatattgccacttacttttgccaacagggtaatacgcttccgtacacgttcggaggggggactaagttggaaataaca

SEQ ID NO: 15513 - protein, 120 aa, synthetic construct
EVKLQESGPGLVAPSQSLSVTCTVSGVSLPDYGVSWIRQPPRKGLEWLGVIWGSETTYYNSALKSRLTIIKDNSKSQVFLKMNSLQTDDTAIYYCAKHYYYGGSYAMDYWGQGTSVTVSS

SEQ ID NO: 15514 - DNA, 360 bp, synthetic construct
  source 1..360: mol_type = other DNA
gaggtgaaactgcaggagtcaggacctggcctggtggcgccctcacagagcctgtccgtcacatgcactgtctcaggggtctcattacccgactatggtgtaagctggattcgccagcctccacgaaagggtctggagtggctgggagtaatatggggtagtgaaaccacatactataattcagctctcaaatccagactgaccatcatcaaggacaactccaagagccaagttttcttaaaaatgaacagtctgcaaactgatgacacagccatttactactgtgccaaacattattactacggtggtagctatgctatggactactggggtcaaggaacctcagtcaccgtctcctca

SEQ ID NO: 15515 - protein, 509 aa, synthetic construct
DIQMTQTTSSLSASLGDRVTISCRASQDISKYLNWYQQKPDGTVKLLIYHTSRLHSGVPSRFSGSGSGTDYSLTISNLEQEDIATYFCQQGNTLPYTFGGGTKLEITGSTSGSGKPGSGEGSTKGEVKLQESGPGLVAPSQSLSVTCTVSGVSLPDYGVSWIRQPPRKGLEWLGVIWGSETTYYNSALKSRLTIIKDNSKSQVFLKMNSLQTDDTAIYYCAKHYYYGGSYAMDYWGQGTSVTVSSTTTPAPRPPTPAPTIASQPLSLRPEACRPAAGGAVHTRGLDFACDIYIWAPLAGTCGVLLLSLVITLYCRSKRSRLLHSDYMNMTPRRPGPTRKHYQPYAPPRDFAAYRSRVKFSRSADAPAYQQGQNQLYNELNLGRREEYDVLDKRRGRDPEMGGKPRRKNPQEGLYNELQKDKMAEAYSEIGMKGERRRGKGHDGLYQGLSTATKDTYDALHMQALPPRKRGRKKLLYIFKQPFMRPVQTTQEEDGCSCRFPEEEEGGCEL

SEQ ID NO: 15516 - DNA, 1527 bp, synthetic construct
  source 1..1527: mol_type = other DNA
gacatccagatgacacagactacatcctccctgtctgcctctctgggagacagagtcaccatcagttgcagggcaagtcaggacattagtaaatatttaaattggtatcagcagaaaccagatggaactgttaaactcctgatctaccatacatcaagattacactcaggagtcccatcaaggttcagtggcagtgggtctggaacagattattctctcaccattagcaacctggagcaagaagatattgccacttacttttgccaacagggtaatacgcttccgtacacgttcggaggggggactaagttggaaataacaggctccacctctggatccggcaagcccggatctggcgagggatccaccaagggcgaggtgaaactgcaggagtcaggacctggcctggtggcgccctcacagagcctgtccgtcacatgcactgtctcaggggtctcattacccgactatggtgtaagctggattcgccagcctccacgaaagggtctggagtggctgggagtaatatggggtagtgaaaccacatactataattcagctctcaaatccagactgaccatcatcaaggacaactccaagagccaagttttcttaaaaatgaacagtctgcaaactgatgacacagccatttactactgtgccaaacattattactacggtggtagctatgctatggactactggggtcaaggaacctcagtcaccgtctcctcaaccactaccccagcaccgaggccacccaccccggctcctaccatcgcctcccagcctctgtccctgcgtccggaggcatgtagacccgcagctggtggggccgtgcatacccggggtcttgacttcgcctgcgatatctacatttgggcccctctggctggtacttgcggggtcctgctgctttcactcgtgatcactctttactgtaggagtaagaggagcaggctcctgcacagtgactacatgaacatgactccccgccgccccgggcccacccgcaagcattaccagccctatgccccaccacgcgacttcgcagcctatcgctccagagtgaagttcagcaggagcgcagacgcccccgcgtaccagcagggccagaaccagctctataacgagctcaatctaggacgaagagaggagtacgatgttttggacaagagacgtggccgggaccctgagatggggggaaagccgagaaggaagaaccctcaggaaggcctgtacaatgaactgcagaaagataagatggcggaggcctacagtgagattgggatgaaaggcgagcgccggaggggcaaggggcacgatggcctttaccagggtctcagtacagccaccaaggacacctacgacgcccttcacatgcaggccctgccccctcgcaaacggggcagaaagaaactcctgtatatattcaaacaaccatttatgagaccagtacaaactactcaagaggaagatggctgtagctgccgatttccagaagaagaagaaggaggatgtgaactg

SEQ ID NO: 15517 - protein, 1017 aa, synthetic construct
MLYTIFLVYGILCFFFVYFCIYLYITVYLCFLFFLFLLLCGDVESNPGPGRARGCRLLYCNIRGLHANLAELDFVSRGVDVVCCSETLVAGRRHDAELALAGFQSPFRRLCGSGPGFRGMAVYVRSGFCAYRQSVHECACHEIIVVRVCGRLNNYYLFSLYRSPATDDSLYDCLLTAMASIQSTDPKAAFVFVGDVNAHHRDWLGSASPTDCHGVAALDFCTLSSCVQLVRGSTHIAGNCLDLVMTDVPDLMTVTVGSPIGSSDHSHLVVSLDLNQVVPVVDTRRVVFVKSRANWVAITRAVRTLPWRQIIHSEDPVSELNDLTVSILERFVPKRTILVRSRDKPWFDDQCRLAFEAKQAAYRAWRRSRDRTLWQTYVDRRAEAKRVYEEAQRRLRQRSRESLLSIDHPHRWWSELKGSVFGAEPSLPPLVGPGGGIITDPLARAELLSAHFDGKQSRDVIALPHGCHPEPRLTSLAFRSGAIKVLLEGLDPYGGVDPVGMFPLFYKQLADVLAPKLAVIFRRLIRLGNFPRCWRTGNITPIPKGPVSPYVANYRPITLTPILSKVFEKLIAGKLGRFAEVTGLLPAGQFAYRIGLGCCDALLSVSHHLQSALDCRSEARLVQLDFSAAFDRVNHRGLLYKLESFGVGGRVLSIIRDFVSERTQSVSVDGVLSASVGVVSGVPQGSVLGPLLFVLYTSDMFSSLENTLINYADDSTLMAVIPAPRLRDAVAQSLNRDLSRISAWCSAWSMKLNASKTKSMIISRSRTLVPQHPQLEIDDTLLQESSSLEILGVVFDEKLTFEPHIRRLVSRASTKIGLLRKVNSVFGDSQVARRCFYAFLLPVLEYCSPVWASAADTHLRLLDRLVSSASRLCADNDLVNLSHRRRVAELCMFYKVYNNERHWLYSSLPALKVFGRETRAACGAHSFTLEAVRCRTNQFCRCFVPWSAKVWNLLPASAFGRIGLQAFKSAVNGFLLDFLGGGSPKKKRKVSGSETPGTSESATPESVSGWRLFKKIS

SEQ ID NO: 15518 - protein, 1156 aa, synthetic construct
MSGTPRVAFDSGKDLRNPIGQSPPALSRAAPGQLGTDPSRSACFIGCLELRVLLDKWIVCRAPDKQESKEKRRQKTQPIRIGSWNVRTMRTGLSDDLTVIEDIRKTAAIDRELYRLNIDIVALQETRLPDSGSLKEDSYTFFWQGKGMEETREHGVGFAVRNTLLHMIEPPTGGTERIITLRLSTHEGPVNLLCVYAPTLQATSEVKDQFYGQLDSAIKKIPVSEHIFILGDFNARVGTDQESWQTVLGHHGIGKMNENGQRLLELCCYHNLCVTNTFFQNKAIHKASWRHPRSQRWHQLDLVITRRTSLNSVCNTRAYHSADCDTDHSLIAARIKLRPKKLHHMKKKGQPKIDVSKTMLPDRNQKFLECLEGTLNNIQPQDAEHRWETLSKTIYSAAAQSYGKKERKNTDWFEAYISELEPVMDTKRKALVSYKQNPSSQNLQALKAARQEAQRASRRCANNYWLLLSERIQLASATGDIRRMYEGIKQATGKPIKKSAPLKAKSGEIITDKDKQMARWVEHYLDIYSTENSVSQDALDNIEDFSVLAELDADPTIEELSKAIDSMSNGKAPGEDNIPAEIIKSGKSVLLEPLHELLRLCWKEGKVPQSMRNSKIVTLYKNKGDRTDCNSYRGISLLSIVGKVFAKVVLTRLQVLADRVYPESQCGFRAERSTTDMIFSVRQLQEKCREQQRPLYIAFIDLTKAFDLVSRRGLFQLLRKIGCPPQLLDIIISFHEDMKGVVSFDGETSEPFAIRSGVKQGCVLAPTLFGIFFSLLLKSAFGHSTQGVHLHTRSDGKLFNLARLRAKTKVRSVLIRDMLFADDAALVAHVEDELQQLLNQFAHACSEFALTISIKKTVVMGQDVPQPPVVTIGSEVLEVTDHFTYLGSTVTSNLSLDKEIDRRIARAAGVMTKLGTRVWNNSHLTLNTKLEVYRSCVLSTLLYGSETWTTYAKQENRLESFHLRCLRRILGISWRDRVPNTTVLERSCSLSIHLLLCQRRLRWLGHVSRMKDGRIPKDILFGELATGKRPVGRPALRFRDVCKRDLKLTDIDPASWEQIAADRNRWRHTVKDGLAKGQERRTEHLESRRRKRKEKPQQGNPSAFICPNCGRDCHARIGLQSHSRRCQPPSGSETPGTSESATPESVSGWRLFKKIS

SEQ ID NO: 15519 - protein, 1003 aa, synthetic construct
MPRKNWNCGRRTGDEKRKMMFGCWNVQGISTKIDLLPAELDMFNIDVVVLSETKRKGKGEEELDNYVHIWSGVSKAVRAKAGVSIMIQKKWKKRITNWTFINERIITVEMTLFAREVVIIGVYAPTNDTKDKEKDAFWDTLRETIEKIPRRKELIIMGDMNGRVGIRESCKIVGKHGEAEYNDNGERLIDICAQFDLKITNTFFKHKDIHKYTWQQNTKELRSIIDYIIIRQTSSFKAADVRSYRGAQCGSDHYLVKMKSFWPWKNATNDTSNINKMNCSEKVQNVHFNIDSLQDESIRTFFKARMERTLDESFEGSTEEIYEYIKTKVKNVASEVLGIKENNPKRAAEWWSEEIETSVKEKRNAFVQWLNDKSEGTRSKYKEKKNEVEKKIRLAKNEAWERTCANVNSKLGFGRAKEAWSVLKALRQDTKGKSNLQLVTQKEWEEYFKKLLNEDRDEYLEEGTVEENEHHDDEILISESEVLQVLRTGKNGKSPGPGNINMEFLKYGGDKIVKLILQLFNKMLHGDSVPKEMKLGYISTIFKKGDRKICSNYRGICVTNTLMRIFGKIIKNKLEKNFRTQQEQCGFTAGRSCVDHIFTLRQILEKHREKSKNVGLIFIDLEKAYDTVPRKLLWRALHRANINTSLIKIIEQMYKDNICQVKIGNTLSQKFRTSKGLLQGCPMSPTLFKIYIDICLRTWSQKCNSMGLEIRDGVYLHHLLFADDQVVIAQDGEDANYMCNQLAIAYKNWGLKINYQKTEYLTNDPHELRIEGKKIKKVNTFCYLGSILETEGKSDSEINKRISSGRKVIGMLNSVLWSRNVMNRTKKIIYKSIFESAVLYGAETWTINQKHTKKLQALEMDFWRRSARISRKEKRRNTEVIKRMEIIERIDEVMDRKKLRWYGHVRRMEDTRIPKLVLEWQPEGRRRRGRPVTTWIKNVQLTMNRLGAEEEDTQDRHTWRNIVNNGGGSPKKKRKVSGSETPGTSESATPESVSGWRLFKKIS

SEQ ID NO: 15520 - protein, 18 aa, synthetic construct
GSTSGSGKPGSGEGSTKG

SEQ ID NO: 15521 - protein, 245 aa, synthetic construct
DIQMTQTTSSLSASLGDRVTISCRASQDISKYLNWYQQKPDGTVKLLIYHTSRLHSGVPSRFSGSGSGTDYSLTISNLEQEDIATYFCQQGNTLPYTFGGGTKLEITGSTSGSGKPGSGEGSTKGEVKLQESGPGLVAPSQSLSVTCTVSGVSLPDYGVSWIRQPPRKGLEWLGVIWGSETTYYNSALKSRLTIIKDNSKSQVFLKMNSLQTDDTAIYYCAKHYYYGGSYAMDYWGQGTSVTVSS

SEQ ID NO: 15522 - protein, 114 aa, synthetic construct
QMQLVQSGAEVKKPGASVKVSCKASGYTFNRYAITWVRQAPGQGLEWMGWISAYNGNSHYAQKLQGRVTMTTDTSTGTAYMELRRLRSDDTAVYYCARMAYDSWGQGTLVTVSS

SEQ ID NO: 15523 - DNA, 342 bp, synthetic construct
  source 1..342: mol_type = other DNA
cagatgcagctggtgcagtctggagctgaggtgaagaagcctggggcctcagtgaaggtctcctgcaaggcttctggttacacctttaacagatatgctatcacctgggtgcgacaggcccctggacaaggccttgagtggatgggatggatcagcgcttacaatggtaattcacactatgcacagaagctccagggcagagtcaccatgaccacagacacatccacgggcacagcctatatggagctgaggaggctgagatctgacgacacggccgtgtattactgtgcgcgcatggcttacgattcttggggtcaaggtactctggtgaccgtctcctca

SEQ ID NO: 15524 - protein, 111 aa, synthetic construct
QSVLTQPASVSGSPGQSLTISCTGTSNDVGAYKYVSWYQQYPGKAPKLILYDVFKRPSGVSNRFSGSKSDNTASLTISGLQAEDEADYYCFSLTSSNTYVFGTGTKVTVLG

SEQ ID NO: 15525 - DNA, 333 bp, synthetic construct
  source 1..333: mol_type = other DNA
cagtctgtgttgacgcagcctgcctccgtgtctgggtctcctggacagtcgctcaccatctcctgcactggaaccagcaatgacgttggtgcttataagtatgtctcctggtatcaacagtacccaggcaaagcccccaaactcatactttatgatgtctttaagcggccctcaggggtctctaatcgcttctctggctccaagtctgacaacacggcctccctgaccatctctgggctccaggctgaggacgaggctgattattactgcttctcacttacaagcagtaacacttatgtcttcggaactgggaccaaggtcaccgtcctaggt

SEQ ID NO: 15526 - protein, 246 aa, synthetic construct
QSVLTQPASVSGSPGQSLTISCTGTSNDVGAYKYVSWYQQYPGKAPKLILYDVFKRPSGVSNRFSGSKSDNTASLTISGLQAEDEADYYCFSLTSSNTYVFGTGTKVTVLGSRGGGGSGGGGSGGGGSLEMAQMQLVQSGAEVKKPGASVKVSCKASGYTFNRYAITWVRQAPGQGLEWMGWISAYNGNSHYAQKLQGRVTMTTDTSTGTAYMELRRLRSDDTAVYYCARMAYDSWGQGTLVTVSS

SEQ ID NO: 15527 - protein, 117 aa, synthetic construct
EVQLVESGGGLVKPGGSLRLSCAASGFTFSDYYMSWIRQAPGKGLEWVSYISSSGSTIYYADSVKGRFTISRDNAKNSLYLQMNSLRAEDTAVYYCARGYGKAYDQWGQGTLVTVSS

SEQ ID NO: 15528 - DNA, 351 bp, synthetic construct
  source 1..351: mol_type = other DNA
gaggtgcagctggtggagtctgggggaggcttggtcaagcctggagggtccctgagactctcctgtgcagcctctggattcaccttcagtgactactacatgagctggatccgccaggctccagggaaggggctggagtgggtttcatacattagtagtagtggtagtaccatatactacgcagactctgtgaagggccgattcaccatctccagggacaacgccaagaactcactgtatctgcaaatgaacagcctgagagccgaggacacggccgtatattactgtgcgcgcggttacggtaaagcttacgatcagtggggtcaaggtactctggtgaccgtctcctca

SEQ ID NO: 15529 - protein, 111 aa, synthetic construct
QSVLTQPPSASGTPGQRVTISCSGSRSNVGGNYVFWYQQVPGATPKLLIYRSNQRPSGVPDRFAGSKSGSSASLAISGLRSEDEADYYCATWDDSLSGFVFGTGTKVTVLG

SEQ ID NO: 15530 - DNA, 333 bp, synthetic construct
  source 1..333: mol_type = other DNA
cagtctgtgttgactcagccaccctcagcgtctgggacccccggacagagggtcaccatctcttgttctggaagcaggtccaacgtaggaggtaattatgtattttggtaccagcaagtccccggagcgacccccaaactcctcatctataggagtaatcagcggccctcgggggtccctgaccgattcgctggctccaagtctggctcctcagcctccctggccatcagtggactccggtccgaggatgaggctgattattactgtgcaacatgggatgacagcctgagtggttttgtcttcggaactgggaccaaggtcaccgtcctaggt

SEQ ID NO: 15531 - protein, 249 aa, synthetic construct
QSVLTQPPSASGTPGQRVTISCSGSRSNVGGNYVFWYQQVPGATPKLLIYRSNQRPSGVPDRFAGSKSGSSASLAISGLRSEDEADYYCATWDDSLSGFVFGTGTKVTVLGSRGGGGSGGGGSGGGGSLEMAEVQLVESGGGLVKPGGSLRLSCAASGFTFSDYYMSWIRQAPGKGLEWVSYISSSGSTIYYADSVKGRFTISRDNAKNSLYLQMNSLRAEDTAVYYCARGYGKAYDQWGQGTLVTVSS

SEQ ID NO: 15532 - protein, 119 aa, synthetic construct
QVQLVESGGGLVHPGGSLRLSCAASGFTFRSHSMNWVRQAPGKGLEWVSSISSDSTYTYYADSVKGRFTISRDNAKNSLYLQMNSLRAEDTAVYYCARSGGQWKYYDYWGQGTLVTVSS

SEQ ID NO: 15533 - DNA, 357 bp, synthetic construct
  source 1..357: mol_type = other DNA
caggtgcagctggtggagtctgggggaggcctggtccaccctggggggtccctgagactctcctgtgcagcctctggattcaccttcagaagccatagcatgaactgggtccgccaggctccagggaaggggctggagtgggtctcatccattagtagtgatagtacttacacatactacgcagactcagtgaagggccgattcaccatctccagagacaacgccaagaactcactgtatctgcaaatgaacagcctgagagccgaggacacggccgtatattactgtgcgcgctctggtggtcagtggaaatactacgattactggggtcaaggtactctggtgaccgtctcctca

SEQ ID NO: 15534 - protein, 110 aa, synthetic construct
SSELTQDPAVSVALGQTVRITCQGDSLRSYYASWYQQKPGQAPVLVIYGKNNRPSGIPDRFSGSSSGNTASLTITGAQAEDEADYYCNSRDSSGNPPVVFGGGTKLTVLG

SEQ ID NO: 15535 - DNA, 330 bp, synthetic construct
  source 1..330: mol_type = other DNA
tcttctgagctgactcaggaccctgctgtgtctgtggccttgggacagacagtcaggatcacatgccaaggagacagcctcagaagctattatgcaagctggtaccagcagaagccaggacaggcccctgtacttgtcatctatggtaaaaacaaccggccctcagggatcccagaccgattctctggctccagctcaggaaacacagcttccttgaccatcactggggctcaggcggaagatgaggctgactattactgtaactcccgggacagcagtggtaacccccctgtggtattcggcggagggaccaagctgaccgtcctaggt

SEQ ID NO: 15536 - protein, 250 aa, synthetic construct
SSELTQDPAVSVALGQTVRITCQGDSLRSYYASWYQQKPGQAPVLVIYGKNNRPSGIPDRFSGSSSGNTASLTITGAQAEDEADYYCNSRDSSGNPPVVFGGGTKLTVLGSRGGGGSGGGGSGGGGSLEMAQVQLVESGGGLVHPGGSLRLSCAASGFTFRSHSMNWVRQAPGKGLEWVSSISSDSTYTYYADSVKGRFTISRDNAKNSLYLQMNSLRAEDTAVYYCARSGGQWKYYDYWGQGTLVTVSS

SEQ ID NO: 15537 - protein, 116 aa, synthetic construct
EVQLVESGGGLIQPGGSLRLSCAASGFTFSNYAMNWVRQAPGKGLEWVSTINGRGSSTIYADSVKGRFTISRDNSKNTLYLQMNSLRAEDTATYYCARYISRGLGDSWGQGTLVTV

SEQ ID NO: 15538 - DNA, 354 bp, synthetic construct
  source 1..354: mol_type = other DNA
gaggtgcagctggtggagtccgggggaggcttgatacagcctggggggtccctgagactctcctgtgcagcctctggattcacctttagcaactatgccatgaactgggtccgccaggctccagggaaggggctggagtgggtctcaactattaatggtcgtggtagtagtacaatctacgcagactccgtgaagggccggttcaccatctccagagacaattccaagaacacgctgtatctgcaaatgaacagcctgagagccgaggacacagccacgtattactgtgcgcgctacatctctcgtggtctgggtgattcttggggtcaaggtactctggtgaccgtctcctca

SEQ ID NO: 15539 - protein, 111 aa, synthetic construct
QSVVTQPPSMSAAPGQQVTISCSGGNSNIERNYVSWYLQLPGTAPKLVIFDNDRRPSGIPDRFSGSKSGTSATLGITGLQTGDEADYYCGTWDSSLRGWVFGGGTKLTVLG

SEQ ID NO: 15540 - DNA, 333 bp, synthetic construct
  source 1..333: mol_type = other DNA
cagtctgtcgtgacgcagccgccctcaatgtctgcggccccaggacagcaagtcaccatctcctgctctggaggcaactccaacattgagagaaattatgtatcctggtacctccagctccctggaacagcccccaaactcgtcatttttgacaatgataggcgaccctcagggattcctgaccgattctctggctccaagtctggcacgtcagccaccctgggcatcaccggactccagactggggacgaggccgattattactgcggaacatgggatagcagcctgagaggttgggtgttcggcggagggaccaagctgaccgtcctaggt

SEQ ID NO: 15541 - protein, 248 aa, synthetic construct
QSVVTQPPSMSAAPGQQVTISCSGGNSNIERNYVSWYLQLPGTAPKLVIFDNDRRPSGIPDRFSGSKSGTSATLGITGLQTGDEADYYCGTWDSSLRGWVFGGGTKLTVLGSRGGGGSGGGGSGGGGSLEMAEVQLVESGGGLIQPGGSLRLSCAASGFTFSNYAMNWVRQAPGKGLEWVSTINGRGSSTIYADSVKGRFTISRDNSKNTLYLQMNSLRAEDTATYYCARYISRGLGDSWGQGTLVTV

SEQ ID NO: 15542 - protein, 21 aa, synthetic construct
MALPVTALLLPLALLLHAARP

SEQ ID NO: 15543 - DNA, 63 bp, synthetic construct
  source 1..63: mol_type = other DNA
atggctctgccggtgaccgccctgcttctgcctcttgccctgctcttgcatgccgctcgcccg

SEQ ID NO: 15544 - DNA, 63 bp, synthetic construct
  source 1..63: mol_type = other DNA
atggctctgcccgtcaccgctctgctgctgcctctggctctgctgctgcacgctgctcgccct

SEQ ID NO: 15545 - DNA, 212 bp, synthetic construct
  source 1..212: mol_type = other DNA
gggcagagcgcacatcgcccacagtccccgagaagttggggggaggggtcggcaattgatccggtgcctagagaaggtggcgcggggtaaactgggaaagtgatgtcgtgtactggctccgcctttttcccgagggtgggggagaaccgtatataagtgcagtagtcgccgtgaacgttctttttcgcaacgggtttgccgccagaacacag

SEQ ID NO: 15546 - protein, 245 aa, synthetic construct
IVLTQSPAILSASPGEKVTMTCRASSSVNYMDWYQKKPGSSPKPWIYATSNLASGVPARFSGSGSGTSYSLTISRVEAEDAATYYCQQWSFNPPTFGGGTKLEIKGSTSGGGSGGGSGGGGSSEVQLQQSGAELVKPGASVKMSCKASGYTFTSYNMHWVKQTPGQGLEWIGAIYPGNGDTSYNQKFKGKATLTADKSSSTAYMQLSSLTSEDSADYYCARSNYYGSSYWFFDVWGAGTTVTVSS

SEQ ID NO: 15547 - DNA, 735 bp, synthetic construct
  source 1..735: mol_type = other DNA
attgtgctgacccaatctccagctatcctgtctgcatctccaggggagaaggtcacaatgacttgcagggccagctcaagtgtaaattacatggactggtaccagaagaagccaggatcctcccccaaaccctggatttatgccacatccaacctggcttctggagtccctgctcgcttcagtggcagtgggtctgggacctcttactctctcacaatcagcagagtggaggctgaagatgctgccacttattactgccagcagtggagttttaatccacccacgttcggaggggggaccaagctggaaataaaaggcagtactagcggtggtggctccgggggcggttccggtgggggcggcagcagcgaggtgcagctgcagcagtctggggctgagctggtgaagcctggggcctcagtgaagatgtcctgcaaggcttctggctacacatttaccagttacaatatgcactgggtaaagcagacacctggacagggcctggaatggattggagctatttatccaggaaatggtgatacttcctacaatcagaagttcaaaggcaaggccacattgactgcagacaaatcctccagcacagcctacatgcagctcagcagcctgacatctgaggactctgcggactattactgtgcaagatctaattattacggtagtagctactggttcttcgatgtctggggcgcagggaccacggtcaccgtctcctca

SEQ ID NO: 15548 - protein, 456 aa, synthetic construct
METDTLLLWVLLLWVPGSTGDIVLTQSPAILSASPGEKVTMTCRASSSVNYMDWYQKKPGSSPKPWIYATSNLASGVPARFSGSGSGTSYSLTISRVEAEDAATYYCQQWSFNPPTFGGGTKLEIKGSTSGGGSGGGSGGGGSSEVQLQQSGAELVKPGASVKMSCKASGYTFTSYNMHWVKQTPGQGLEWIGAIYPGNGDTSYNQKFKGKATLTADKSSSTAYMQLSSLTSEDSADYYCARSNYYGSSYWFFDVWGAGTTVTVSSESKYGPPCPPCPMFWVLVVVGGVLACYSLLVTVAFIIFWVRSKRSRLLHSDYMNMTPRRPGPTRKHYQPYAPPRDFAAYRSFSRSADAPAYQQGQNQLYNELNLGRREEYDVLDKRRGRDPEMGGKPRRKNPQEGLYNELQKDKMAEAYSEIGMKGERRRGKGHDGLYQGLSTATKDTYDALHMQALPPR

SEQ ID NO: 15549 - DNA, 1368 bp, synthetic construct
  source 1..1368: mol_type = other DNA
atggagacagacacactcctgctatgggtgctgctgctctgggttccaggttccacaggtgacattgtgctgacccaatctccagctatcctgtctgcatctccaggggagaaggtcacaatgacttgcagggccagctcaagtgtaaattacatggactggtaccagaagaagccaggatcctcccccaaaccctggatttatgccacatccaacctggcttctggagtccctgctcgcttcagtggcagtgggtctgggacctcttactctctcacaatcagcagagtggaggctgaagatgctgccacttattactgccagcagtggagttttaatccacccacgttcggaggggggaccaagctggaaataaaaggcagtactagcggtggtggctccgggggcggttccggtgggggcggcagcagcgaggtgcagctgcagcagtctggggctgagctggtgaagcctggggcctcagtgaagatgtcctgcaaggcttctggctacacatttaccagttacaatatgcactgggtaaagcagacacctggacagggcctggaatggattggagctatttatccaggaaatggtgatacttcctacaatcagaagttcaaaggcaaggccacattgactgcagacaaatcctccagcacagcctacatgcagctcagcagcctgacatctgaggactctgcggactattactgtgcaagatctaattattacggtagtagctactggttcttcgatgtctggggcgcagggaccacggtcaccgtctcctcagagagcaagtacggaccgccctgccccccttgccctatgttctgggtgctggtggtggtcggaggcgtgctggcctgctacagcctgctggtcaccgtggccttcatcatcttttgggtgaggagtaagaggagcaggctcctgcacagtgactacatgaacatgactccccgccgccccgggcccacccgcaagcattaccagccctatgccccaccacgcgacttcgcagcctatcgctccttcagcagaagcgccgacgcccctgcctaccagcagggccagaatcagctgtacaacgagctgaacctgggcagaagggaagagtacgacgtcctggataagcggagaggccgggaccctgagatgggcggcaagcctcggcggaagaacccccaggaaggcctgtataacgaactgcagaaagacaagatggccgaggcctacagcgagatcggcatgaagggcgagcggaggcggggcaagggccacgacggcctgtatcagggcctgtccaccgccaccaaggatacctacgacgccctgcacatgcaggccctgcccccaagg

SEQ ID NO: 15550 - RNA, 100 nt, synthetic construct
  source 1..100: mol_type = other RNA
  misc_difference 1..100: note = This sequence may encompass 5, 10, 20, 30, 50, 70, or 100 nucleotides
aaaaaaaaaaaaaaaaaaaaaaaaaaaaaaaaaaaaaaaaaaaaaaaaaaaaaaaaaaaaaaaaaaaaaaaaaaaaaaaaaaaaaaaaaaaaaaaaaaaa

What is claimed is:

1. A system for modifying DNA comprising:
(a) a gene modifying polypeptide or a nucleic acid (e.g., DNA or mRNA) encoding the gene modifying polypeptide, and
(b) a template RNA (or DNA encoding the template RNA) comprising (i) a sequence that binds the polypeptide and (ii) a heterologous object sequence encoding a chimeric antigen receptor (CAR), wherein the CAR comprises an antigen-binding domain, a transmembrane domain, a first intracellular signaling domain, and a second intracellular signaling domain.

2. A system for modifying DNA comprising:
(a) a gene modifying polypeptide or a nucleic acid (e.g., DNA or mRNA) encoding the gene modifying polypeptide, and
(b) a template RNA (or DNA encoding the template RNA) comprising (i) a sequence that binds the polypeptide and (ii) a heterologous object sequence encoding a chimeric antigen receptor (CAR), wherein one or more of:
(i) the CAR comprises an antigen binding domain that binds one or more antigens of a blood cancer (e.g., a leukemia or lymphoma), wherein optionally the antigen is a B cell antigen;
(ii) the CAR comprises an antigen binding domain that binds one or more antigens of a solid tumor;
(iii) the CAR comprises an antigen binding domain of any one of Tables C1-C5 or C9;
(iv) the CAR comprises a linker domain of Table L1 (e.g., a linker of SEQ ID NO 15520);
(v) the CAR comprises a transmembrane domain of Table C6 or C6A;
(vi) the CAR comprises a hinge domain (e.g., a hinge domain of Table C8);
(vii) the CAR comprises an intracellular signaling domain of Table C7 or C7A;
(viii) the CAR comprises a costimulatory domain of Table C7 or C7A;
(ix) the CAR comprises an antigen binding domain which comprises an scFv, a Fab, a diabody, a D domain binder, a centryin, or one or more single domain antibodies (e.g., VHH domains); or
(x) the CAR comprises an amino acid sequence of Table C9 or an amino acid sequence according to any one of SEQ ID NOs: 1100, 15490, 15492, 15498, 15500, 15502, 15503, 15505, 15507, 15509 and 15510, 15555, 15557 and 15558, 15559, 15560, 15561, 15515, 15526, 15531, 15536, 15541, or 15548;
(xi) wherein the CAR comprises a first intracellular signaling domain and a second intracellular signaling domain.

3. A population of cells comprising immune effector cells and/or regulatory immune cells, the population comprising:
a plurality of copies of a gene encoding a CAR (“a CAR gene”), wherein less than or equal to 70%, 65%, 60%, or 55% of copies of the CAR gene in the population are situated within a gene endogenous to a cell of the population.

4. A population of cells comprising immune effector cells and/or regulatory immune cells, the population comprising:
a plurality of copies of a gene encoding a CAR (“a CAR gene”), wherein
at least 20%, 25%, 30%, 35%, or 40% of copies of the CAR gene in the population are situated within an intergenic region endogenous to a cell of the population.

5. A method of modifying the genome of a mammalian cell, comprising contacting the cell with a system of claim 1 or 2, thereby modifying the genome of the mammalian cell.

6. A reaction mixture comprising:
a system of claim 1 or 2, and
a mammalian cell.

7. A cell or population of cells produced by the method of claim 5.

8. A method of treating a cancer in a subject in need thereof, the method comprising administering to the subject a cell or population of cells of any of claims 3, 4, or 7.

9. A cell or population of cells of any of claims 3, 4, or 7, or the system of claim 1 or 2, for use in treating a cancer.

10. Use of a cell or population of cells of any of claims 3, 4, or 7, or the system of claim 1 or 2, in the manufacture of a medicament for treating a cancer.

11. A method of treating a cancer in a subject in need thereof, the method comprising contacting an immune effector cell and/or a regulatory immune cell of the subject with a system of claim 1 or 2.

12. A gene modifying polypeptide comprising an amino acid sequence of SEQ ID NO: 420, or a sequence having at least 70%, 75%, 80%, 85%, 90%, 95%, 96%, 97%, 98%, or 99% identity thereto, wherein amino acid position 191 is other than D, e.g., is A, or a fragment thereof having reverse transcriptase activity.

13. A gene modifying polypeptide comprising an amino acid sequence of SEQ ID NO: 421, or a sequence having at least 70%, 75%, 80%, 85%, 90%, 95%, 96%, 97%, 98%, or 99% identity thereto, wherein amino acid position 250 is other than D, e.g., is A, or a fragment thereof having reverse transcriptase activity.

14. A nucleic acid encoding a gene modifying polypeptide of claim 12 or 13.

15. A method of modifying the genome of a mammalian induced pluripotent stem cell (iPSC), the method comprising contacting the cell with:
(a) a gene modifying polypeptide, or a nucleic acid (e.g., DNA or mRNA) encoding the gene modifying polypeptide, and
(b) a template RNA (or DNA encoding the template RNA) comprising (i) a sequence that binds the polypeptide and (ii) a heterologous object sequence.

16. The method of any of claims 5, 8, 11, or 15, wherein the DNA damage response (DDR) pathway in the cell (e.g., an iPSC) is not activated, or is activated less than in an otherwise similar cell treated with Cas9, e.g., in an assay according to Example 2.

17. The method of any of claims 5, 8, 11, 15, or 16, wherein the interferon response is not activated, or is activated less than in an otherwise similar cell treated with a gene modifying system comprising elements from a LINE-1 retrotransposase, e.g., in an assay according to Example 3.

18. A method of modifying the genome of a mammalian respiratory epithelial cell (e.g., a bronchial epithelial cell, e.g., a human bronchial epithelial (hBE) cell), the method comprising contacting the cell with:
(a) a gene modifying polypeptide, or a nucleic acid (e.g., DNA or mRNA) encoding the gene modifying polypeptide, and
(b) a template RNA (or DNA encoding the template RNA) comprising (i) a sequence that binds the polypeptide and (ii) a heterologous object sequence.

19. A lipid nanoparticle (LNP) composition comprising the system of claim 1 or 2.

20. A system for modifying DNA comprising:
(a) a first gene modifying system comprising: (i) a retrotransposon gene modifying polypeptide or a nucleic acid (e.g., DNA or mRNA) encoding the retrotransposon gene modifying polypeptide, and (ii) a first template RNA (or DNA encoding the template RNA) comprising (1) a sequence that binds the polypeptide and (2) a first heterologous object sequence; and
(b) a second system comprising: (i) a heterologous gene modifying polypeptide or a nucleic acid (e.g., DNA or mRNA) encoding the heterologous gene modifying polypeptide, and (ii) a second template RNA (or DNA encoding the template RNA) comprising (1) a gRNA spacer, (2) a gRNA scaffold, (3) a heterologous object sequence, and (4) a primer binding site (PBS) sequence.

21. The system of claim 20, wherein the second system further comprises a third template RNA (or DNA encoding the template RNA) comprising (1) a gRNA spacer, (2) a gRNA scaffold, (3) a heterologous object sequence, and (4) a primer binding site (PBS) sequence.

22. The system of claim 20 or 21, wherein the retrotransposon gene modifying polypeptide comprises an amino acid sequence of Table R1 or a sequence having no more than 10, 20, 30, 40, 50, 60, 70, 80, 90, or 100 amino acid differences thereto, or a nucleic acid (e.g., DNA or mRNA) encoding the retrotransposon gene modifying polypeptide.

23. The system of any one of claims 20-22, wherein the retrotransposon gene modifying polypeptide comprises an amino acid sequence listed in any of Examples 6-10 or a sequence having no more than 10, 20, 30, 40, 50, 60, 70, 80, 90, or 100 amino acid differences thereto, or a nucleic acid (e.g., DNA or mRNA) encoding the retrotransposon gene modifying polypeptide.

24. The system of any of claims 20-23, wherein the sequence that binds the polypeptide comprises a 5′UTRᵣₑₜᵣₒ or a 3′ UTRᵣₑₜᵣₒ.

25. The system of claim 24, wherein the first template RNA comprises both of a 5′UTRᵣₑₜᵣₒ and a 3′ UTRᵣₑₜᵣₒ.

26. The system of claim 24, wherein the 5′UTRᵣₑₜᵣₒ and the 3′ UTRᵣₑₜᵣₒ comprise 5′ or 3′ sequences of Table R1 or any of Examples 6-10.

27. The system of any of claims 20-26, wherein the first heterologous object sequence encodes a chimeric antigen receptor (CAR), wherein the CAR comprises an antigen-binding domain, a transmembrane domain, a first intracellular signaling domain, and a second intracellular signaling domain.

28. The gene modifying system of any of claims 20-27, wherein the heterologous gene modifying polypeptide comprises:
a reverse transcriptase (RT) domain (e.g., an RT domain from a retrovirus, or a polypeptide domain having at least 75%, 80%, 85%, 90%, 95%, 96%, 97%, 98%, or 99% amino acids sequence identity thereto); and
a Cas domain that binds to the target DNA molecule and is heterologous to the RT domain (e.g., a Cas9 domain); and optionally, a linker disposed between the RT domain and the Cas domain.

29. The system of claim 28, wherein the RT domain comprises an amino acid sequence of Table 6, or a sequence having at least 70%, 80%, 85%, 90%, 95%, 97%, 98%, or 99% identity thereto.

30. The gene modifying system of claim 28 or 29, wherein the Cas domain comprises a Cas domain of Table 7 or Table 8A, or a sequence having at least 70%, 80%, 85%, 90%, 95%, 97%, 98%, or 99% identity thereto.

31. A method of modifying the genome of a mammalian cell, comprising contacting a population of mammalian cells with a system of any one of claims 20-30, thereby modifying the genome of a cell of the population.

32. The method of claim 31, wherein the first gene modifying system produces a first sequence alteration (e.g., an insertion) and the second system produces a second sequence alteration in the genome of the mammalian cell.

33. The method of claim 32, wherein at least 5%, 10%, or 20% of cells in the population comprise the first sequence alteration.

34. The method of any 32 or 33, wherein at least 10%, 20%, 30%, 40%, 50%, or 60% of cells in the population comprise the second sequence alteration.

35. The method of any one of claims 32-34, wherein at least 20%, 40%, 60%, 80% of cells that comprise the first sequence alteration also comprise the second sequence alteration.

36. The method of any one of claims 32-35, wherein the modifying does not result in a translocation event.

37. A template RNA comprising from 5′ to 3′:
(i) a gRNA spacer that is complementary to a first portion of the human TRAC gene;
(ii) a gRNA scaffold that binds a heterologous gene modifying polypeptide (e.g., binds the Cas domain of the heterologous gene modifying polypeptide),
(iii) a heterologous object sequence comprising a mutation region to introduce a mutation into (e.g., to correct a mutation in) a second portion of the human TRAC gene (wherein optionally the heterologous object sequence comprises, from 5′ to 3′, a post-edit homology region, a mutation region, and a pre-edit homology region), and
(iv) a primer binding site (PBS) sequence comprising at least 5, 6, 7, or 8 bases with 100% identity to a third portion of the human TRAC gene,
wherein the template RNA comprises a nucleotide sequence according to SEQ ID NO: 15,000 or 15,001.
